United States Patent Application Publication US 2024/0390496 A1 - sequence listing, part 4

SEQ ID NO: 7726 - DNA, 2340 bp, Artificial Sequence
  Synthetic Polynucleotide
atggccttaccagtgaccgccttgctcctgccgctggccttgctgctccacgccgccaggccggacatccagatgacacagagccctagcagcctgtctgccagcgtgggagacagagtgaccatcacatgcaaggccagcgaccacatcaacaactggctggcctggtatcagcagaagcctggacaggcccctaagctgctgatctacggcgctaccacactggaaacaggcgtgcccagcagattttctggcagcggctctggcaccgactacaccctgacaatatccagcctccagcctgaggacttcgccacctactactgtcagcagagctggaacaccccttggacattcggccagggcaccaagctggaaatcaagagaggcggaggcggaagtggaggcggaggatctggcggcggaggctctcaagttcagcttcaacagcctggcgctgagctggtcaaacctggcgcttctgtgaagatgagctgcaaagccagcggctacgccttcagcagctactggatcaactggatgaagcagaaacccggccagggactcgaatggatcggccaaatctatcccggcgacggcgacaccaactacaacggcaagttcaagggcagagccacactgaccgccgatacctctagcagcacagcctacatgcagctgagcagcctgaccagcgaagatagcgccgtgtacttctgtgcccggtccatcacaacagtcgtgggctgcgctatggactattggggccagggaacaagcgtgaccgtgtctagtacgcgtggcggaggcggaagtggaggcggaggatctggcggcggaggctctgcgcgtggaatgaggactgaggatcttcccaaagctgtcgtctttctcgaaccccaatggtatcgggtgctcgaaaaagactctgtgacactgaaatgccaaggggcctactctcccgaggacaactccacacagtggtttcataatgagtccctcatcagctctcaggccagctcttatttcattgatgccgctacagtggacgactccggcgagtatcggtgtcagaccaatctgtctacactgtctgaccccgtgcagcttgaggtccacattggatggttgctcttgcaagccccacgctgggttttcaaagaggaagatccaatccatctgcggtgccacagctggaaaaacaccgctctccacaaagtcacatacctgcaaaatggcaaaggacgcaaatacttccatcacaattccgatttttacattccgaaggctaccctgaaagacagcggcagctatttctgccggggactcgtcggctccaagaatgtgtcctccgaaaccgtgaatatcacgattacccaaggactggctgtgcctacaatctctagcttctttccgcctggataccaagtctccttctgtcttgtgatggtcctcctgtttgctgtggacacaggactgtacttttccgtgaaaacgaacatccgcagctccacacgcgattggaaagatcacaagtttaaatggcgcaaagatccccaggacaagcgcgccaagagaagcggatctggcgtgaagcagaccctgaatttcgacctgctgaagctggctggcgacgtggaatccaacccaggcccttctagaatgtaccggatgcagctgctgagctgtatcgccctgtctctggccctggtcacaaatagcgcccctaccagcagcagcaccaagaaaacccagctgcaactggaacacctcctgctggacctccagatgatcctgaacggcatcaacaactacaagaaccccaagctgaccgagatgctgaccgccaagttctacatgcccaagaaggccaccgagctgaagcacctccagtgcctggaagaggaactgaagcccctggaagaagtgctgaatctggcccagagcaagaacttccacctgaggccaagggacctgatctccaacatcaacgtggccgtgctggaactgaaaggcagcgagacaaccttcatgtgcgagtacgccgacgagacagctaccatcgtggaatttctgaatcggtggatcaccttctgccagagcatcatcagcaccctgacaaagatcgaagtgatgtaccctcctccttacctggacaacgagaagtccaacggcaccatcatccacgtgaagggcaagcacctgtgtccttctccactgttccccggacctagcaagcctttctgggtgctcgttgttgttggcggcgtgctggcctgttacagcctgctggttaccgtggccttcatcatcttttgggtccgaagcaagcggagctaa

SEQ ID NO: 7727 - DNA, 2283 bp, Artificial Sequence
  Synthetic Polynucleotide
atggccttaccagtgaccgccttgctcctgccgctggccttgctgctccacgccgccaggccggacatccagatgacacagagccctagcagcctgtctgccagcgtgggagacagagtgaccatcacatgcaaggccagcgaccacatcaacaactggctggcctggtatcagcagaagcctggacaggcccctaagctgctgatctacggcgctaccacactggaaacaggcgtgcccagcagattttctggcagcggctctggcaccgactacaccctgacaatatccagcctccagcctgaggacttcgccacctactactgtcagcagagctggaacaccccttggacattcggccagggcaccaagctggaaatcaagagaggcggaggcggaagtggaggcggaggatctggcggcggaggctctcaagttcagcttcaacagcctggcgctgagctggtcaaacctggcgcttctgtgaagatgagctgcaaagccagcggctacgccttcagcagctactggatcaactggatgaagcagaaacccggccagggactcgaatggatcggccaaatctatcccggcgacggcgacaccaactacaacggcaagttcaagggcagagccacactgaccgccgatacctctagcagcacagcctacatgcagctgagcagcctgaccagcgaagatagcgccgtgtacttctgtgcccggtccatcacaacagtcgtgggctgcgctatggactattggggccagggaacaagcgtgaccgtgtctagtacgcgtggcggaggcggaagtggaggcggaggatctggcggcggaggctctgcgcgtggaatgaggactgaggatcttcccaaagctgtcgtctttctcgaaccccaatggtatcgggtgctcgaaaaagactctgtgacactgaaatgccaaggggcctactctcccgaggacaactccacacagtggtttcataatgagtccctcatcagctctcaggccagctcttatttcattgatgccgctacagtggacgactccggcgagtatcggtgtcagaccaatctgtctacactgtctgaccccgtgcagcttgaggtccacattggatggttgctcttgcaagccccacgctgggttttcaaagaggaagatccaatccatctgcggtgccacagctggaaaaacaccgctctccacaaagtcacatacctgcaaaatggcaaaggacgcaaatacttccatcacaattccgatttttacattccgaaggctaccctgaaagacagcggcagctatttctgccggggactcgtcggctccaagaatgtgtcctccgaaaccgtgaatatcacgattacccaaggactggctgtgcctacaatctctagcttctttccgcctggataccaagtctccttctgtcttgtgatggtcctcctgtttgctgtggacacaggactgtacttttccgtgaaaacgaacatccgcagctccacacgcgattggaaagatcacaagtttaaatggcgcaaagatccccaggacaagcgcgccaagagaagcggatctggcgtgaagcagaccctgaatttcgacctgctgaagctggctggcgacgtggaatccaacccaggcccttctagaatgtaccggatgcagctgctgagctgtatcgccctgtctctggccctggtcacaaatagcaactgggttaacgtgatctccgacctgaagaagatcgaggacctgatccagtccatgcacatcgacgccacactgtacaccgagagcgacgtgcaccctagctgtaaagtgaccgccatgaagtgctttctgctggaactgcaagtgatctccctggaaagcggcgacgccagcatccacgacaccgtggaaaacctgattatccgggctaacaacagcctgagcagcaacggcaacgtgaccgagtccggctgtaaagagtgcgaggaactggaagagaagaatatcaaagagttcctccagagcttcgtgcacatcgtgcagatgttcatcaacaccagcaagatcgaagtgatgtaccctcctccttacctggacaacgagaagtccaacggcaccatcatccacgtgaagggcaagcacctgtgtccttctccactgttccccggacctagcaagcctttctgggtgctcgttgttgttggcggcgtgctggcctgttacagcctgctggttaccgtggccttcatcatcttttgggtccgaagcaagcggagctaa

SEQ ID NO: 7728 - DNA, 2340 bp, Artificial Sequence
  Synthetic Polynucleotide
atggccttaccagtgaccgccttgctcctgccgctggccttgctgctccacgccgccaggccggacatccagatgacacagagccctagcagcctgtctgccagcgtgggagacagagtgaccatcacatgcaaggccagcgaccacatcaacaactggctggcctggtatcagcagaagcctggacaggcccctaagctgctgatctacggcgctaccacactggaaacaggcgtgcccagcagattttctggcagcggctctggcaccgactacaccctgacaatatccagcctccagcctgaggacttcgccacctactactgtcagcagagctggaacaccccttggacattcggccagggcaccaagctggaaatcaagagaggcggaggcggaagtggaggcggaggatctggcggcggaggctctcaagttcagcttcaacagcctggcgctgagctggtcaaacctggcgcttctgtgaagatgagctgcaaagccagcggctacgccttcagcagctactggatcaactggatgaagcagaaacccggccagggactcgaatggatcggccaaatctatcccggcgacggcgacaccaactacaacggcaagttcaagggcagagccacactgaccgccgatacctctagcagcacagcctacatgcagctgagcagcctgaccagcgaagatagcgccgtgtacttctgtgcccggtccatcacaacagtcgtgggctgcgctatggactattggggccagggaacaagcgtgaccgtgtctagtacgcgtggcggaggcggaagtggaggcggaggatctggcggcggaggctctgcgcgtggaatgaggactgaggatcttcccaaagctgtcgtctttctcgaaccccaatggtatcgggtgctcgaaaaagactctgtgacactgaaatgccaaggggcctactctcccgaggacaactccacacagtggtttcataatgagtccctcatcagctctcaggccagctcttatttcattgatgccgctacagtggacgactccggcgagtatcggtgtcagaccaatctgtctacactgtctgaccccgtgcagcttgaggtccacattggatggttgctcttgcaagccccacgctgggttttcaaagaggaagatccaatccatctgcggtgccacagctggaaaaacaccgctctccacaaagtcacatacctgcaaaatggcaaaggacgcaaatacttccatcacaattccgatttttacattccgaaggctaccctgaaagacagcggcagctatttctgccggggactcgtcggctccaagaatgtgtcctccgaaaccgtgaatatcacgattacccaaggactggctgtgcctacaatctctagcttctttccgcctggataccaagtctccttctgtcttgtgatggtcctcctgtttgctgtggacacaggactgtacttttccgtgaaaacgaacatccgcagctccacacgcgattggaaagatcacaagtttaaatggcgcaaagatccccaggacaagcgcgccaagagaagcggatctggcgtgaagcagaccctgaatttcgacctgctgaagctggctggcgacgtggaatccaacccaggcccttctagaatgtaccggatgcagctgctgagctgtatcgccctgtctctggccctggtcacaaatagcgcccctaccagcagcagcaccaagaaaacccagctgcaactggaacacctcctgctggacctccagatgatcctgaacggcatcaacaactacaagaaccccaagctgaccgagatgctgaccgccaagttctacatgcccaagaaggccaccgagctgaagcacctccagtgcctggaagaggaactgaagcccctggaagaagtgctgaatctggcccagagcaagaacttccacctgaggccaagggacctgatctccaacatcaacgtgatcgtgctggaactgaaaggcagcgagacaaccttcatgtgcgagtacgccgacgagacagctaccatcgtggaatttctgaatcggtggatcaccttctgccagagcatcatcagcaccctgacaaagatcgaagtgatgtaccctcctccttacctggacaacgagaagtccaacggcaccatcatccacgtgaagggcaagcacctgtgtccttctccactgttccccggacctagcaagcctttctgggtgctcgttgttgttggcggcgtgctggcctgttacagcctgctggttaccgtggccttcatcatcttttgggtccgaagcaagcggagctaa

SEQ ID NO: 7729 - DNA, 2283 bp, Artificial Sequence
  Synthetic Polynucleotide
atggccttaccagtgaccgccttgctcctgccgctggccttgctgctccacgccgccaggccggacatccagatgacacagagccctagcagcctgtctgccagcgtgggagacagagtgaccatcacatgcaaggccagcgaccacatcaacaactggctggcctggtatcagcagaagcctggacaggcccctaagctgctgatctacggcgctaccacactggaaacaggcgtgcccagcagattttctggcagcggctctggcaccgactacaccctgacaatatccagcctccagcctgaggacttcgccacctactactgtcagcagagctggaacaccccttggacattcggccagggcaccaagctggaaatcaagagaggcggaggcggaagtggaggcggaggatctggcggcggaggctctcaagttcagcttcaacagcctggcgctgagctggtcaaacctggcgcttctgtgaagatgagctgcaaagccagcggctacgccttcagcagctactggatcaactggatgaagcagaaacccggccagggactcgaatggatcggccaaatctatcccggcgacggcgacaccaactacaacggcaagttcaagggcagagccacactgaccgccgatacctctagcagcacagcctacatgcagctgagcagcctgaccagcgaagatagcgccgtgtacttctgtgcccggtccatcacaacagtcgtgggctgcgctatggactattggggccagggaacaagcgtgaccgtgtctagtacgcgtggcggaggcggaagtggaggcggaggatctggcggcggaggctctgcgcgtggaatgaggactgaggatcttcccaaagctgtcgtctttctcgaaccccaatggtatcgggtgctcgaaaaagactctgtgacactgaaatgccaaggggcctactctcccgaggacaactccacacagtggtttcataatgagtccctcatcagctctcaggccagctcttatttcattgatgccgctacagtggacgactccggcgagtatcggtgtcagaccaatctgtctacactgtctgaccccgtgcagcttgaggtccacattggatggttgctcttgcaagccccacgctgggttttcaaagaggaagatccaatccatctgcggtgccacagctggaaaaacaccgctctccacaaagtcacatacctgcaaaatggcaaaggacgcaaatacttccatcacaattccgatttttacattccgaaggctaccctgaaagacagcggcagctatttctgccggggactcgtcggctccaagaatgtgtcctccgaaaccgtgaatatcacgattacccaaggactggctgtgcctacaatctctagcttctttccgcctggataccaagtctccttctgtcttgtgatggtcctcctgtttgctgtggacacaggactgtacttttccgtgaaaacgaacatccgcagctccacacgcgattggaaagatcacaagtttaaatggcgcaaagatccccaggacaagcgcgccaagagaagcggatctggcgtgaagcagaccctgaatttcgacctgctgaagctggctggcgacgtggaatccaacccaggcccttctagaatgtaccggatgcagctgctgagctgtatcgccctgtctctggccctggtcacaaatagcaactgggttaacgtgatctccgacctgaagaagatcgaggacctgatccagtccatgcacatcgacgccacactgtacaccgagagcgacgtgcaccctagctgtaaagtgaccgccatgaagtgctttctgctggaactgcaagtgatctccctggaaagcggcgacgccagcatccacgacaccgtgaagaacctgattatcctggctaacaacagcctgagcagcaacggcaacgtgaccgagtccggctgtaaagagtgcgaggaactggaagagaagaatatcaaagagttcctccagagcttcgtgcacatcgtgcagatgttcatcaacaccagcaagatcgaagtgatgtaccctcctccttacctggacaacgagaagtccaacggcaccatcatccacgtgaagggcaagcacctgtgtccttctccactgttccccggacctagcaagcctttctgggtgctcgttgttgttggcggcgtgctggcctgttacagcctgctggttaccgtggccttcatcatcttttgggtccgaagcaagcggagctaa

SEQ ID NO: 7730 - DNA, 2283 bp, Artificial Sequence
  Synthetic Polynucleotide
atggccttaccagtgaccgccttgctcctgccgctggccttgctgctccacgccgccaggccggacatccagatgacacagagccctagcagcctgtctgccagcgtgggagacagagtgaccatcacatgcaaggccagcgaccacatcaacaactggctggcctggtatcagcagaagcctggacaggcccctaagctgctgatctacggcgctaccacactggaaacaggcgtgcccagcagattttctggcagcggctctggcaccgactacaccctgacaatatccagcctccagcctgaggacttcgccacctactactgtcagcagagctggaacaccccttggacattcggccagggcaccaagctggaaatcaagagaggcggaggcggaagtggaggcggaggatctggcggcggaggctctcaagttcagcttcaacagcctggcgctgagctggtcaaacctggcgcttctgtgaagatgagctgcaaagccagcggctacgccttcagcagctactggatcaactggatgaagcagaaacccggccagggactcgaatggatcggccaaatctatcccggcgacggcgacaccaactacaacggcaagttcaagggcagagccacactgaccgccgatacctctagcagcacagcctacatgcagctgagcagcctgaccagcgaagatagcgccgtgtacttctgtgcccggtccatcacaacagtcgtgggctgcgctatggactattggggccagggaacaagcgtgaccgtgtctagtacgcgtggcggaggcggaagtggaggcggaggatctggcggcggaggctctgcgcgtggaatgaggactgaggatcttcccaaagctgtcgtctttctcgaaccccaatggtatcgggtgctcgaaaaagactctgtgacactgaaatgccaaggggcctactctcccgaggacaactccacacagtggtttcataatgagtccctcatcagctctcaggccagctcttatttcattgatgccgctacagtggacgactccggcgagtatcggtgtcagaccaatctgtctacactgtctgaccccgtgcagcttgaggtccacattggatggttgctcttgcaagccccacgctgggttttcaaagaggaagatccaatccatctgcggtgccacagctggaaaaacaccgctctccacaaagtcacatacctgcaaaatggcaaaggacgcaaatacttccatcacaattccgatttttacattccgaaggctaccctgaaagacagcggcagctatttctgccggggactcgtcggctccaagaatgtgtcctccgaaaccgtgaatatcacgattacccaaggactggctgtgcctacaatctctagcttctttccgcctggataccaagtctccttctgtcttgtgatggtcctcctgtttgctgtggacacaggactgtacttttccgtgaaaacgaacatccgcagctccacacgcgattggaaagatcacaagtttaaatggcgcaaagatccccaggacaagcgcgccaagagaagcggatctggcgtgaagcagaccctgaatttcgacctgctgaagctggctggcgacgtggaatccaacccaggcccttctagaatgtaccggatgcagctgctgagctgtatcgccctgtctctggccctggtcacaaatagcaactgggttaacgtgatctccagcctgaagaagatcgaggacctgatccagtccatgcacatcgacgccacactgtacaccgagagcgacgtgcaccctagctgtaaagtgaccgccatgaagtgctttctgctggaactgcaagtgatctccctggaaagcggcgacgccagcatccacgacaccgtggaaaacctgattatcctggctaacaacagcctgagcagcaacggcaacgtgaccgagtccggctgtaaagagtgcgaggaactggaagagaagaatatcaaagagttcctccagagcttcgtgcacatcgtgcagatgttcatcaacaccagcaagatcgaagtgatgtaccctcctccttacctggacaacgagaagtccaacggcaccatcatccacgtgaagggcaagcacctgtgtccttctccactgttccccggacctagcaagcctttctgggtgctcgttgttgttggcggcgtgctggcctgttacagcctgctggttaccgtggccttcatcatcttttgggtccgaagcaagcggagctaa

SEQ ID NO: 7731 - DNA, 2643 bp, Artificial Sequence
  Synthetic Polynucleotide
atggccttaccagtgaccgccttgctcctgccgctggccttgctgctccacgccgccaggccggacatccagatgacacagagccctagcagcctgtctgccagcgtgggagacagagtgaccatcacatgcaaggccagcgaccacatcaacaactggctggcctggtatcagcagaagcctggacaggcccctaagctgctgatctacggcgctaccacactggaaacaggcgtgcccagcagattttctggcagcggctctggcaccgactacaccctgacaatatccagcctccagcctgaggacttcgccacctactactgtcagcagagctggaacaccccttggacattcggccagggcaccaagctggaaatcaagagactcgaggccgacgtgtcccccaagcctaccatcttcctgccctctatcgccgagacaaagctccagaaggccggcacctacctgtgcctgctggaaaagttcttcccagatgtgattaagatccactggcaggaaaagaagtccaacaccatcctgggcagccaggaaggcaacaccatgaagaccaacgacacctacatgaagttcagctggctgaccgtgcccgagaagtccctggacaaagaacacagatgcatcgtgcggcacgaaaacaacaagaacggcgtggaccaggaaatcatcttcccacccatcaagaccgatgtgattacaatggaccccaaggacaactgctccaaggacgccaacgataccctgctgctccagctgaccaacaccagcgcctactacatgtacttgttgctgctgctgaagtccgtggtgtacttcgccatcatcacatgctgcctgctgcggagaaccgccttctgctgcaacggcgagaagtctagggccaagcgatctggatctggagcaacaaacttctcactactcaaacaagcaggtgacgtggaggagaatcccgggcctactagtatggactggatttggcgcatccttttccttgtcggcgctgctaccggcgcgcattccttcgaacaagttcagcttcaacagcctggcgctgagctggtcaaacctggcgcttctgtgaagatgagctgcaaagccagcggctacgccttcagcagctactggatcaactggatgaagcagaaacccggccagggactcgaatggatcggccaaatctatcccggcgacggcgacaccaactacaacggcaagttcaagggcagagccacactgaccgccgatacctctagcagcacagcctacatgcagctgagcagcctgaccagcgaagatagcgccgtgtacttctgtgcccggtccatcacaacagtcgtgggctgcgctatggactattggggccagggaacaagcgtgaccgtgtctagtacgcgtcctcacaccaagcccagcgtgttcgtgatgaagaacggcaccaacgtggcctgcctcgtgaaagagttctaccccaaggacatcaggatcaacctggtgtccagcaagaagatcaccgagttcgaccccgccatcgtgatctcccccagcggcaagtacaacgccgtgaagctggggaagtacgaggacagcaacagcgtgacctgctccgtgcagcacgacaacaagaccgtgcacagcaccgactttgaagtgaaaaccgactccaccgaccacgtgaagcccaaagagacagagaacaccaagcagcccagcaagagctgccacaagcccaaggccatcgtgcacaccgagaaagtgaacatgatgagcctgaccgtgctgggcctgcggatgctgttcgccaaaaccgtggccgtgaacttcctgctgaccgccaagctgttcttcctccgcgccaagagaagcggatctggcgtgaagcagaccctgaatttcgacctgctgaagctggctggcgacgtggaatccaacccaggcccttctagaatgtaccggatgcagctgctgagctgtatcgccctgtctctggccctggtcacaaatagcgcccctaccagcagcagcaccaagaaaacccagctgcaactggaacacctcctgctggacctccagatgatcctgaacggcatcaacaactacaagaaccccaagctgaccgagatgctgaccgccaagttctacatgcccaagaaggccaccgagctgaagcacctccagtgcctggaagaggaactgaagcccctggaagaagtgctgaatctggcccagagcaagaacttccacctgaggccaagggacctgatctccaacatcaacgtgatcgtgctggaactgaaaggcagcgagacaaccttcatgtgcgagtacgccgacgagacagctaccatcgtggaatttctgaatcggtggatcaccttctgccagagcatcatcagcaccctgacaaagatcgaagtgatgtaccctcctccttacctggacaacgagaagtccaacggcaccatcatccacgtgaagggcaagcacctgtgtccttctccactgttccccggacctagcaagcctttctgggtgctcgttgttgttggcggcgtgctggcctgttacagcctgctggttaccgtggccttcatcatcttttgggtccgaagcaagcggagctaa

SEQ ID NO: 7732 - DNA, 3228 bp, Artificial Sequence
  Synthetic Polynucleotide
atggccttaccagtgaccgccttgctcctgccgctggccttgctgctccacgccgccaggccggacatccagatgacacagagccctagcagcctgtctgccagcgtgggagacagagtgaccatcacatgcaaggccagcgaccacatcaacaactggctggcctggtatcagcagaagcctggacaggcccctaagctgctgatctacggcgctaccacactggaaacaggcgtgcccagcagattttctggcagcggctctggcaccgactacaccctgacaatatccagcctccagcctgaggacttcgccacctactactgtcagcagagctggaacaccccttggacattcggccagggcaccaagctggaaatcaagagactcgaggacctgaagaacgtgttcccacctgaggtggccgtgttcgagcctagcgaggccgagatcagccacacccagaaagccaccctcgtgtgcctggctaccggcttctaccccgaccatgtggaactgtcttggtgggtcaacggcaaagaggtgcacagcggcgtgtctaccgacccccagccactgaaagaacagcccgccctgaacgacagccggtactgcctgagcagcagactgagagtgtccgccaccttctggcagaacccccggaaccacttcagatgccaggtgcagttctacggcctgagcgagaacgacgagtggacccaggacagagccaagcccgtgacccagatcgtgtctgccgaagcctggggcagagccgattgcggatcccagagcttcggcctgctggaccccaagctgtgctacctgctggatggcatcctgttcatctacggcgtgatcctgaccgccctgttcctgagagtgaagttcagcagaagcgccgacgcccctgcctaccagcagggacagaaccaactgtacaacgagctgaacctgggcagacgggaagagtacgacgtgctggacaagcggagaggcagggaccctgagatgggcggaaagccccagcggagaaagaacccccaggaaggactgtataacgaactccagaaagacaagatggccgaagcctacagcgagatcggcatgaagggcgagcggagaagaggcaagggccacgatggcctgtaccagggcctgagcaccgccaccaaggacacctatgacgccctgcacatgcaggccctgcctccaagaagggccaagcgatctggatctggagcaacaaacttctcactactcaaacaagcaggtgacgtggaggagaatcccgggcctactagtatggactggatttggcgcatccttttccttgtcggcgctgctaccggcgcgcattccttcgaacaagttcagcttcaacagcctggcgctgagctggtcaaacctggcgcttctgtgaagatgagctgcaaagccagcggctacgccttcagcagctactggatcaactggatgaagcagaaacccggccagggactcgaatggatcggccaaatctatcccggcgacggcgacaccaactacaacggcaagttcaagggcagagccacactgaccgccgatacctctagcagcacagcctacatgcagctgagcagcctgaccagcgaagatagcgccgtgtacttctgtgcccggtccatcacaacagtcgtgggctgcgctatggactattggggccagggaacaagcgtgaccgtgtctagtacgcgtatccagaaccctgatcctgccgtgtaccagctgcgggatagcaagagcagcgacaagagcgtgtgtctgttcaccgacttcgacagccagaccaacgtgtcccagagcaaggactccgacgtgtacatcaccgataagaccgtgctggacatgcggagcatggacttcaagagcaactccgccgtggcctggtccaacaagtccgatttcgcctgcgccaacgccttcaacaacagcattatccccgaggacacattcttcccaagccccgagagcagctgcggtacccagagttttgggttgttggaccctaaattgtgctatctgttggacggaatcctgttcatttacggagtgatcctgaccgcattgttcctgcgggttaagttttccagatccgcagacgcacccgcttaccaacaagggcagaaccaactctacaatgaacttaatttggggcggagggaagagtacgacgttctggacaaaaggaggggacgagatcccgagatgggcggaaagcctcagcgaaggaagaatccgcaagaggggctttataacgaactccagaaagataaaatggcagaagcctatagtgagattgggatgaagggagaaaggaggaggggtaaaggtcacgatgggttgtaccaaggattgagcacagccactaaagatacctatgatgcgctccacatgcaggccctgccgccaagacgcgccaagagaagcggatctggcgtgaagcagaccctgaatttcgacctgctgaagctggctggcgacgtggaatccaacccaggcccttctagaatgtaccggatgcagctgctgagctgtatcgccctgtctctggccctggtcacaaatagcgcccctaccagcagcagcaccaagaaaacccagctgcaactggaacacctcctgctggacctccagatgatcctgaacggcatcaacaactacaagaaccccaagctgaccgagatgctgaccgccaagttctacatgcccaagaaggccaccgagctgaagcacctccagtgcctggaagaggaactgaagcccctggaagaagtgctgaatctggcccagagcaagaacttccacctgaggccaagggacctgatctccaacatcaacgtgatcgtgctggaactgaaaggcagcgagacaaccttcatgtgcgagtacgccgacgagacagctaccatcgtggaatttctgaatcggtggatcaccttctgccagagcatcatcagcaccctgacaaagatcgaagtgatgtaccctcctccttacctggacaacgagaagtccaacggcaccatcatccacgtgaagggcaagcacctgtgtccttctccactgttccccggacctagcaagcctttctgggtgctcgttgttgttggcggcgtgctggcctgttacagcctgctggttaccgtggccttcatcatcttttgggtccgaagcaagcggagctaa

SEQ ID NO: 7733 - DNA, 3228 bp, Artificial Sequence
  Synthetic Polynucleotide
atggccttaccagtgaccgccttgctcctgccgctggccttgctgctccacgccgccaggccggacatccagatgacacagagccctagcagcctgtctgccagcgtgggagacagagtgaccatcacatgcaaggccagcgaccacatcaacaactggctggcctggtatcagcagaagcctggacaggcccctaagctgctgatctacggcgctaccacactggaaacaggcgtgcccagcagattttctggcagcggctctggcaccgactacaccctgacaatatccagcctccagcctgaggacttcgccacctactactgtcagcagagctggaacaccccttggacattcggccagggcaccaagctggaaatcaagagactcgaggacctgaagaacgtgttcccacctgaggtggccgtgttcgagcctagcgaggccgagatcagccacacccagaaagccaccctcgtgtgcctggctaccggcttctaccccgaccatgtggaactgtcttggtgggtcaacggcaaagaggtgcacagcggcgtgtctaccgacccccagccactgaaagaacagcccgccctgaacgacagccggtactgcctgagcagcagactgagagtgtccgccaccttctggcagaacccccggaaccacttcagatgccaggtgcagttctacggcctgagcgagaacgacgagtggacccaggacagagccaagcccgtgacccagatcgtgtctgccgaagcctggggcagagccgattgcggatcccagagcttcggcctgctggaccccaagctgtgctacctgctggatggcatcctgttcatctacggcgtgatcctgaccgccctgttcctgagagtgaagttcagcagaagcgccgacgcccctgcctaccagcagggacagaaccaactgtacaacgagctgaacctgggcagacgggaagagtacgacgtgctggacaagcggagaggcagggaccctgagatgggcggaaagccccagcggagaaagaacccccaggaaggactgtataacgaactccagaaagacaagatggccgaagcctacagcgagatcggcatgaagggcgagcggagaagaggcaagggccacgatggcctgtaccagggcctgagcaccgccaccaaggacacctatgacgccctgcacatgcaggccctgcctccaagaagggccaagcgatctggatctggagcaacaaacttctcactactcaaacaagcaggtgacgtggaggagaatcccgggcctactagtatggactggatttggcgcatccttttccttgtcggcgctgctaccggcgcgcattccttcgaacaagttcagcttcaacagcctggcgctgagctggtcaaacctggcgcttctgtgaagatgagctgcaaagccagcggctacgccttcagcagctactggatcaactggatgaagcagaaacccggccagggactcgaatggatcggccaaatctatcccggcgacggcgacaccaactacaacggcaagttcaagggcagagccacactgaccgccgatacctctagcagcacagcctacatgcagctgagcagcctgaccagcgaagatagcgccgtgtacttctgtgcccggtccatcacaacagtcgtgggctgcgctatggactattggggccagggaacaagcgtgaccgtgtctagtacgcgtatccagaaccctgatcctgccgtgtaccagctgcgggatagcaagagcagcgacaagagcgtgtgtctgttcaccgacttcgacagccagaccaacgtgtcccagagcaaggactccgacgtgtacatcaccgataagaccgtgctggacatgcggagcatggacttcaagagcaactccgccgtggcctggtccaacaagtccgatttcgcctgcgccaacgccttcaacaacagcattatccccgaggacacattcttcccaagccccgagagcagctgcggtacccagagttttgggttgttggaccctaaattgtgctatctgttggacggaatcctgttcatttacggagtgatcctgaccgcattgttcctgcgggttaagttttccagatccgcagacgcacccgcttaccaacaagggcagaaccaactctacaatgaacttaatttggggcggagggaagagtacgacgttctggacaaaaggaggggacgagatcccgagatgggcggaaagcctcagcgaaggaagaatccgcaagaggggctttataacgaactccagaaagataaaatggcagaagcctatagtgagattgggatgaagggagaaaggaggaggggtaaaggtcacgatgggttgtaccaaggattgagcacagccactaaagatacctatgatgcgctccacatgcaggccctgccgccaagacgcgccaagagaagcggatctggcgtgaagcagaccctgaatttcgacctgctgaagctggctggcgacgtggaatccaacccaggcccttctagaatgtaccggatgcagctgctgagctgtatcgccctgtctctggccctggtcacaaatagcgcccctaccagcagcagcaccaagaaaacccagctgcaactggaacacctcctgctggacctccagatgatcctgaacggcatcaacaactacaagaaccccaagctgaccgccatgctgaccaagaagttctacatgcccaagaaggccaccgagctgaagcacctccagtgcctggaagaggaactgaagcccctggaagaagtgctgaatctggcccagagcaagaacttccacctgaggccaagggacctgatctccaacatcaacgtgatcgtgctggaactgaaaggcagcgagacaaccttcatgtgcgagtacgccgacgagacagctaccatcgtggaatttctgaatcggtggatcaccttctgcgccagcatcatcagcaccctgacaaagatcgaagtgatgtaccctcctccttacctggacaacgagaagtccaacggcaccatcatccacgtgaagggcaagcacctgtgtccttctccactgttccccggacctagcaagcctttctgggtgctcgttgttgttggcggcgtgctggcctgttacagcctgctggttaccgtggccttcatcatcttttgggtccgaagcaagcggagctaa

SEQ ID NO: 7734 - DNA, 3171 bp, Artificial Sequence
  Synthetic Polynucleotide
atggccttaccagtgaccgccttgctcctgccgctggccttgctgctccacgccgccaggccggacatccagatgacacagagccctagcagcctgtctgccagcgtgggagacagagtgaccatcacatgcaaggccagcgaccacatcaacaactggctggcctggtatcagcagaagcctggacaggcccctaagctgctgatctacggcgctaccacactggaaacaggcgtgcccagcagattttctggcagcggctctggcaccgactacaccctgacaatatccagcctccagcctgaggacttcgccacctactactgtcagcagagctggaacaccccttggacattcggccagggcaccaagctggaaatcaagagactcgaggacctgaagaacgtgttcccacctgaggtggccgtgttcgagcctagcgaggccgagatcagccacacccagaaagccaccctcgtgtgcctggctaccggcttctaccccgaccatgtggaactgtcttggtgggtcaacggcaaagaggtgcacagcggcgtgtctaccgacccccagccactgaaagaacagcccgccctgaacgacagccggtactgcctgagcagcagactgagagtgtccgccaccttctggcagaacccccggaaccacttcagatgccaggtgcagttctacggcctgagcgagaacgacgagtggacccaggacagagccaagcccgtgacccagatcgtgtctgccgaagcctggggcagagccgattgcggatcccagagcttcggcctgctggaccccaagctgtgctacctgctggatggcatcctgttcatctacggcgtgatcctgaccgccctgttcctgagagtgaagttcagcagaagcgccgacgcccctgcctaccagcagggacagaaccaactgtacaacgagctgaacctgggcagacgggaagagtacgacgtgctggacaagcggagaggcagggaccctgagatgggcggaaagccccagcggagaaagaacccccaggaaggactgtataacgaactccagaaagacaagatggccgaagcctacagcgagatcggcatgaagggcgagcggagaagaggcaagggccacgatggcctgtaccagggcctgagcaccgccaccaaggacacctatgacgccctgcacatgcaggccctgcctccaagaagggccaagcgatctggatctggagcaacaaacttctcactactcaaacaagcaggtgacgtggaggagaatcccgggcctactagtatggactggatttggcgcatccttttccttgtcggcgctgctaccggcgcgcattccttcgaacaagttcagcttcaacagcctggcgctgagctggtcaaacctggcgcttctgtgaagatgagctgcaaagccagcggctacgccttcagcagctactggatcaactggatgaagcagaaacccggccagggactcgaatggatcggccaaatctatcccggcgacggcgacaccaactacaacggcaagttcaagggcagagccacactgaccgccgatacctctagcagcacagcctacatgcagctgagcagcctgaccagcgaagatagcgccgtgtacttctgtgcccggtccatcacaacagtcgtgggctgcgctatggactattggggccagggaacaagcgtgaccgtgtctagtacgcgtatccagaaccctgatcctgccgtgtaccagctgcgggatagcaagagcagcgacaagagcgtgtgtctgttcaccgacttcgacagccagaccaacgtgtcccagagcaaggactccgacgtgtacatcaccgataagaccgtgctggacatgcggagcatggacttcaagagcaactccgccgtggcctggtccaacaagtccgatttcgcctgcgccaacgccttcaacaacagcattatccccgaggacacattcttcccaagccccgagagcagctgcggtacccagagttttgggttgttggaccctaaattgtgctatctgttggacggaatcctgttcatttacggagtgatcctgaccgcattgttcctgcgggttaagttttccagatccgcagacgcacccgcttaccaacaagggcagaaccaactctacaatgaacttaatttggggcggagggaagagtacgacgttctggacaaaaggaggggacgagatcccgagatgggcggaaagcctcagcgaaggaagaatccgcaagaggggctttataacgaactccagaaagataaaatggcagaagcctatagtgagattgggatgaagggagaaaggaggaggggtaaaggtcacgatgggttgtaccaaggattgagcacagccactaaagatacctatgatgcgctccacatgcaggccctgccgccaagacgcgccaagagaagcggatctggcgtgaagcagaccctgaatttcgacctgctgaagctggctggcgacgtggaatccaacccaggcccttctagaatgtaccggatgcagctgctgagctgtatcgccctgtctctggccctggtcacaaatagcaactgggttaacgtgatctccagcctgaagaagatcgaggacctgatccagtccatgcacatcgacgccacactgtacaccgagagcgacgtgcaccctagctgtaaagtgaccgccatgaagtgctttctgctggaactgcaagtgatctccctggaaagcggcgacgccagcatccacgacaccgtggaaaacctgattatcctggctaacaacagcctgagcagcaacggcaacgtgaccgagtccggctgtaaagagtgcgaggaactggaagagaagaatatcaaagagttcctccagagcttcgtgcacatcgtgcagatgttcatcaacaccagcaagatcgaagtgatgtaccctcctccttacctggacaacgagaagtccaacggcaccatcatccacgtgaagggcaagcacctgtgtccttctccactgttccccggacctagcaagcctttctgggtgctcgttgttgttggcggcgtgctggcctgttacagcctgctggttaccgtggccttcatcatcttttgggtccgaagcaagcggagctaa

SEQ ID NO: 7735 - DNA, 3171 bp, Artificial Sequence
  Synthetic Polynucleotide
atggccttaccagtgaccgccttgctcctgccgctggccttgctgctccacgccgccaggccggacatccagatgacacagagccctagcagcctgtctgccagcgtgggagacagagtgaccatcacatgcaaggccagcgaccacatcaacaactggctggcctggtatcagcagaagcctggacaggcccctaagctgctgatctacggcgctaccacactggaaacaggcgtgcccagcagattttctggcagcggctctggcaccgactacaccctgacaatatccagcctccagcctgaggacttcgccacctactactgtcagcagagctggaacaccccttggacattcggccagggcaccaagctggaaatcaagagactcgaggacctgaagaacgtgttcccacctgaggtggccgtgttcgagcctagcgaggccgagatcagccacacccagaaagccaccctcgtgtgcctggctaccggcttctaccccgaccatgtggaactgtcttggtgggtcaacggcaaagaggtgcacagcggcgtgtctaccgacccccagccactgaaagaacagcccgccctgaacgacagccggtactgcctgagcagcagactgagagtgtccgccaccttctggcagaacccccggaaccacttcagatgccaggtgcagttctacggcctgagcgagaacgacgagtggacccaggacagagccaagcccgtgacccagatcgtgtctgccgaagcctggggcagagccgattgcggatcccagagcttcggcctgctggaccccaagctgtgctacctgctggatggcatcctgttcatctacggcgtgatcctgaccgccctgttcctgagagtgaagttcagcagaagcgccgacgcccctgcctaccagcagggacagaaccaactgtacaacgagctgaacctgggcagacgggaagagtacgacgtgctggacaagcggagaggcagggaccctgagatgggcggaaagccccagcggagaaagaacccccaggaaggactgtataacgaactccagaaagacaagatggccgaagcctacagcgagatcggcatgaagggcgagcggagaagaggcaagggccacgatggcctgtaccagggcctgagcaccgccaccaaggacacctatgacgccctgcacatgcaggccctgcctccaagaagggccaagcgatctggatctggagcaacaaacttctcactactcaaacaagcaggtgacgtggaggagaatcccgggcctactagtatggactggatttggcgcatccttttccttgtcggcgctgctaccggcgcgcattccttcgaacaagttcagcttcaacagcctggcgctgagctggtcaaacctggcgcttctgtgaagatgagctgcaaagccagcggctacgccttcagcagctactggatcaactggatgaagcagaaacccggccagggactcgaatggatcggccaaatctatcccggcgacggcgacaccaactacaacggcaagttcaagggcagagccacactgaccgccgatacctctagcagcacagcctacatgcagctgagcagcctgaccagcgaagatagcgccgtgtacttctgtgcccggtccatcacaacagtcgtgggctgcgctatggactattggggccagggaacaagcgtgaccgtgtctagtacgcgtatccagaaccctgatcctgccgtgtaccagctgcgggatagcaagagcagcgacaagagcgtgtgtctgttcaccgacttcgacagccagaccaacgtgtcccagagcaaggactccgacgtgtacatcaccgataagaccgtgctggacatgcggagcatggacttcaagagcaactccgccgtggcctggtccaacaagtccgatttcgcctgcgccaacgccttcaacaacagcattatccccgaggacacattcttcccaagccccgagagcagctgcggtacccagagttttgggttgttggaccctaaattgtgctatctgttggacggaatcctgttcatttacggagtgatcctgaccgcattgttcctgcgggttaagttttccagatccgcagacgcacccgcttaccaacaagggcagaaccaactctacaatgaacttaatttggggcggagggaagagtacgacgttctggacaaaaggaggggacgagatcccgagatgggcggaaagcctcagcgaaggaagaatccgcaagaggggctttataacgaactccagaaagataaaatggcagaagcctatagtgagattgggatgaagggagaaaggaggaggggtaaaggtcacgatgggttgtaccaaggattgagcacagccactaaagatacctatgatgcgctccacatgcaggccctgccgccaagacgcgccaagagaagcggatctggcgtgaagcagaccctgaatttcgacctgctgaagctggctggcgacgtggaatccaacccaggcccttctagaatgtaccggatgcagctgctgagctgtatcgccctgtctctggccctggtcacaaatagcaactgggttaacgtgatctccgacctgaagaagatcgaggacctgatccagtccatgcacatcgacgccacactgtacaccgagagcgacgtgcaccctagctgtaaagtgaccgccatgaagtgctttctgctggaactgcaagtgatctccctggaaagcggcgacgccagcatccacgacaccgtggaaaacctgattatccgggctaacaacagcctgagcagcaacggcaacgtgaccgagtccggctgtaaagagtgcgaggaactggaagagaagaatatcaaagagttcctccagagcttcgtgcacatcgtgcagatgttcatcaacaccagcaagatcgaagtgatgtaccctcctccttacctggacaacgagaagtccaacggcaccatcatccacgtgaagggcaagcacctgtgtccttctccactgttccccggacctagcaagcctttctgggtgctcgttgttgttggcggcgtgctggcctgttacagcctgctggttaccgtggccttcatcatcttttgggtccgaagcaagcggagctaa

SEQ ID NO: 7736 - DNA, 3234 bp, Artificial Sequence
  Synthetic Polynucleotide
atggccttaccagtgaccgccttgctcctgccgctggccttgctgctccacgccgccaggccggacatccagatgacacagagccctagcagcctgtctgccagcgtgggagacagagtgaccatcacatgcaaggccagcgaccacatcaacaactggctggcctggtatcagcagaagcctggacaggcccctaagctgctgatctacggcgctaccacactggaaacaggcgtgcccagcagattttctggcagcggctctggcaccgactacaccctgacaatatccagcctccagcctgaggacttcgccacctactactgtcagcagagctggaacaccccttggacattcggccagggcaccaagctggaaatcaagagactcgaggacctgaagaacgtgttcccacctgaggtggccgtgttcgagcctagcgaggccgagatcagccacacccagaaagccaccctcgtgtgcctggctaccggcttctaccccgaccatgtggaactgtcttggtgggtcaacggcaaagaggtgcacagcggcgtgtctaccgacccccagccactgaaagaacagcccgccctgaacgacagccggtactgcctgagcagcagactgagagtgtccgccaccttctggcagaacccccggaaccacttcagatgccaggtgcagttctacggcctgagcgagaacgacgagtggacccaggacagagccaagcccgtgacccagatcgtgtctgccgaagcctggggcagagccgattgcggatcccagagcttcggcctgctggaccccaagctgtgctacctgctggatggcatcctgttcatctacggcgtgatcctgaccgccctgttcctgagagtgaagttcagcagaagcgccgacgcccctgcctaccagcagggacagaaccaactgtacaacgagctgaacctgggcagacgggaagagtacgacgtgctggacaagcggagaggcagggaccctgagatgggcggaaagccccagcggagaaagaacccccaggaaggactgtataacgaactccagaaagacaagatggccgaagcctacagcgagatcggcatgaagggcgagcggagaagaggcaagggccacgatggcctgtaccagggcctgagcaccgccaccaaggacacctatgacgccctgcacatgcaggccctgcctccaagaagggccaagcgatctggatctggagcaacaaacttctcactactcaaacaagcaggtgacgtggaggagaatcccgggcctactagtatggactggatttggcgcatccttttccttgtcggcgctgctaccggcgcgcattccttcgaacaagttcagcttcaacagcctggcgctgagctggtcaaacctggcgcttctgtgaagatgagctgcaaagccagcggctacgccttcagcagctactggatcaactggatgaagcagaaacccggccagggactcgaatggatcggccaaatctatcccggcgacggcgacaccaactacaacggcaagttcaagggcagagccacactgaccgccgatacctctagcagcacagcctacatgcagctgagcagcctgaccagcgaagatagcgccgtgtacttctgtgcccggtccatcacaacagtcgtgggctgcgctatggactattggggccagggaacaagcgtgaccgtgtctagtacgcgtatccagaaccctgatcctgccgtgtaccagctgcgggatagcaagagcagcgacaagagcgtgtgtctgttcaccgacttcgacagccagaccaacgtgtcccagagcaaggactccgacgtgtacatcaccgataagaccgtgctggacatgcggagcatggacttcaagagcaactccgccgtggcctggtccaacaagtccgatttcgcctgcgccaacgccttcaacaacagcattatccccgaggacacattcttcccaagccccgagagcagctgcggtacccagagttttgggttgttggaccctaaattgtgctatctgttggacggaatcctgttcatttacggagtgatcctgaccgcattgttcctgcgggttaagttttccagatccgcagacgcacccgcttaccaacaagggcagaaccaactctacaatgaacttaatttggggcggagggaagagtacgacgttctggacaaaaggaggggacgagatcccgagatgggcggaaagcctcagcgaaggaagaatccgcaagaggggctttataacgaactccagaaagataaaatggcagaagcctatagtgagattgggatgaagggagaaaggaggaggggtaaaggtcacgatgggttgtaccaaggattgagcacagccactaaagatacctatgatgcgctccacatgcaggccctgccgccaagacgcgccaagagaagcggatctggcgtgaagcagaccctgaatttcgacctgctgaagctggctggcgacgtggaatccaacccaggcccttctagaatgtaccggatgcagctgctgagctgtatcgccctgtctctggccctggtcacaaatagcgcccctaccagcagcagcaccaagaaaacccagctgcaactggaacacctcctgctggacctccagatgatcctgaacggcatcaacaactacaagaaccccaagctgacccggatgctgaccttcaagttctacatgcccaagaaggccaccgagctgaagcacctccagtgcctggaagaggaactgaagcccctggaagaagtgctgaatctggcccagagcaagaacttccacctgaggccaagggacctgatctccaacatcaacgtgatcgtgctggaactgaaaggcagcgagacaaccttcatgtgcgagtacgccgacgagacagctaccatcgtggaatttctgaatcggtggatcaccttctgccagagcatcatcagcaccctgacagcgcgtaaaattgaagttatgtatcctcctccttacctagacaatgagaagagcaatggaaccattatccatgtgaaagggaaacacctttgtccaagtcccctatttcccggaccttctaagcccttttgggtgctggtggtggttgggggagtcctggcttgctatagcttgctagtaacagtggcctttattattttctgggtgaggagtaagaggagctaa

SEQ ID NO: 7737 - DNA, 2844 bp, Artificial Sequence
  Synthetic Polynucleotide
atggccttaccagtgaccgccttgctcctgccgctggccttgctgctccacgccgccaggccggacatccagatgacacagagccctagcagcctgtctgccagcgtgggagacagagtgaccatcacatgcaaggccagcgaccacatcaacaactggctggcctggtatcagcagaagcctggacaggcccctaagctgctgatctacggcgctaccacactggaaacaggcgtgcccagcagattttctggcagcggctctggcaccgactacaccctgacaatatccagcctccagcctgaggacttcgccacctactactgtcagcagagctggaacaccccttggacattcggccagggcaccaagctggaaatcaagagactcgaggacctgaagaacgtgttcccacctgaggtggccgtgttcgagcctagcgaggccgagatcagccacacccagaaagccaccctcgtgtgcctggctaccggcttctaccccgaccatgtggaactgtcttggtgggtcaacggcaaagaggtgcacagcggcgtgtctaccgacccccagccactgaaagaacagcccgccctgaacgacagccggtactgcctgagcagcagactgagagtgtccgccaccttctggcagaacccccggaaccacttcagatgccaggtgcagttctacggcctgagcgagaacgacgagtggacccaggacagagccaagcccgtgacccagatcgtgtctgccgaagcctggggcagagccgattgcggatcccagagcttcggcctgctggaccccaagctgtgctacctgctggatggcatcctgttcatctacggcgtgatcctgaccgccctgttcctgagagtgaagttcagcagaagcgccgacgcccctgcctaccagcagggacagaaccaactgtacaacgagctgaacctgggcagacgggaagagtacgacgtgctggacaagcggagaggcagggaccctgagatgggcggaaagccccagcggagaaagaacccccaggaaggactgtataacgaactccagaaagacaagatggccgaagcctacagcgagatcggcatgaagggcgagcggagaagaggcaagggccacgatggcctgtaccagggcctgagcaccgccaccaaggacacctatgacgccctgcacatgcaggccctgcctccaagaagggccaagcgatctggatctggagcaacaaacttctcactactcaaacaagcaggtgacgtggaggagaatcccgggcctactagtatggactggatttggcgcatccttttccttgtcggcgctgctaccggcgcgcattccttcgaacaagttcagcttcaacagcctggcgctgagctggtcaaacctggcgcttctgtgaagatgagctgcaaagccagcggctacgccttcagcagctactggatcaactggatgaagcagaaacccggccagggactcgaatggatcggccaaatctatcccggcgacggcgacaccaactacaacggcaagttcaagggcagagccacactgaccgccgatacctctagcagcacagcctacatgcagctgagcagcctgaccagcgaagatagcgccgtgtacttctgtgcccggtccatcacaacagtcgtgggctgcgctatggactattggggccagggaacaagcgtgaccgtgtctagtacgcgtatccagaaccctgatcctgccgtgtaccagctgcgggatagcaagagcagcgacaagagcgtgtgtctgttcaccgacttcgacagccagaccaacgtgtcccagagcaaggactccgacgtgtacatcaccgataagaccgtgctggacatgcggagcatggacttcaagagcaactccgccgtggcctggtccaacaagtccgatttcgcctgcgccaacgccttcaacaacagcattatccccgaggacacattcttcccaagccccgagagcagctgcggtacccagagttttgggttgttggaccctaaattgtgctatctgttggacggaatcctgttcatttacggagtgatcctgaccgcattgttcctgcgggttaagttttccagatccgcagacgcacccgcttaccaacaagggcagaaccaactctacaatgaacttaatttggggcggagggaagagtacgacgttctggacaaaaggaggggacgagatcccgagatgggcggaaagcctcagcgaaggaagaatccgcaagaggggctttataacgaactccagaaagataaaatggcagaagcctatagtgagattgggatgaagggagaaaggaggaggggtaaaggtcacgatgggttgtaccaaggattgagcacagccactaaagatacctatgatgcgctccacatgcaggccctgccgccaagacgcgccaagagaagcggatctggcgtgaagcagaccctgaatttcgacctgctgaagctggctggcgacgtggaatccaacccaggcccttctagaatggattggatatggaggatactttttctcgtgggggcagcaaccggggctcattccttgcagatggctgggcagtgctcccaaaatgaatattttgacagtttgttgcacgcttgcataccttgtcaacttcgatgttcttctaatactcctcctctaacatgtcagcgttattgtaatgcaagtgtgaccaattcagtgaaaggaacgaatgcgattctctggacctgtttgggactgagcttaataatttctttggcagttttcgtgctaatgtttttgctaaggaagtaa

SEQ ID NO: 7738 - DNA, 3252 bp, Artificial Sequence
  Synthetic Polynucleotide
atggccttaccagtgaccgccttgctcctgccgctggccttgctgctccacgccgccaggccggacatccagatgacacagagccctagcagcctgtctgccagcgtgggagacagagtgaccatcacatgcaaggccagcgaccacatcaacaactggctggcctggtatcagcagaagcctggacaggcccctaagctgctgatctacggcgctaccacactggaaacaggcgtgcccagcagattttctggcagcggctctggcaccgactacaccctgacaatatccagcctccagcctgaggacttcgccacctactactgtcagcagagctggaacaccccttggacattcggccagggcaccaagctggaaatcaagagactcgaggacctgaagaacgtgttcccacctgaggtggccgtgttcgagcctagcgaggccgagatcagccacacccagaaagccaccctcgtgtgcctggctaccggcttctaccccgaccatgtggaactgtcttggtgggtcaacggcaaagaggtgcacagcggcgtgtctaccgacccccagccactgaaagaacagcccgccctgaacgacagccggtactgcctgagcagcagactgagagtgtccgccaccttctggcagaacccccggaaccacttcagatgccaggtgcagttctacggcctgagcgagaacgacgagtggacccaggacagagccaagcccgtgacccagatcgtgtctgccgaagcctggggcagagccgattgcggatcccagagcttcggcctgctggaccccaagctgtgctacctgctggatggcatcctgttcatctacggcgtgatcctgaccgccctgttcctgagagtgaagttcagcagaagcgccgacgcccctgcctaccagcagggacagaaccaactgtacaacgagctgaacctgggcagacgggaagagtacgacgtgctggacaagcggagaggcagggaccctgagatgggcggaaagccccagcggagaaagaacccccaggaaggactgtataacgaactccagaaagacaagatggccgaagcctacagcgagatcggcatgaagggcgagcggagaagaggcaagggccacgatggcctgtaccagggcctgagcaccgccaccaaggacacctatgacgccctgcacatgcaggccctgcctccaagaagggccaagcgatctggatctggagcaacaaacttctcactactcaaacaagcaggtgacgtggaggagaatcccgggcctactagtatggactggatttggcgcatccttttccttgtcggcgctgctaccggcgcgcattccttcgaacaagttcagcttcaacagcctggcgctgagctggtcaaacctggcgcttctgtgaagatgagctgcaaagccagcggctacgccttcagcagctactggatcaactggatgaagcagaaacccggccagggactcgaatggatcggccaaatctatcccggcgacggcgacaccaactacaacggcaagttcaagggcagagccacactgaccgccgatacctctagcagcacagcctacatgcagctgagcagcctgaccagcgaagatagcgccgtgtacttctgtgcccggtccatcacaacagtcgtgggctgcgctatggactattggggccagggaacaagcgtgaccgtgtctagtacgcgtatccagaaccctgatcctgccgtgtaccagctgcgggatagcaagagcagcgacaagagcgtgtgtctgttcaccgacttcgacagccagaccaacgtgtcccagagcaaggactccgacgtgtacatcaccgataagaccgtgctggacatgcggagcatggacttcaagagcaactccgccgtggcctggtccaacaagtccgatttcgcctgcgccaacgccttcaacaacagcattatccccgaggacacattcttcccaagccccgagagcagctgcggtacccagagttttgggttgttggaccctaaattgtgctatctgttggacggaatcctgttcatttacggagtgatcctgaccgcattgttcctgcgggttaagttttccagatccgcagacgcacccgcttaccaacaagggcagaaccaactctacaatgaacttaatttggggcggagggaagagtacgacgttctggacaaaaggaggggacgagatcccgagatgggcggaaagcctcagcgaaggaagaatccgcaagaggggctttataacgaactccagaaagataaaatggcagaagcctatagtgagattgggatgaagggagaaaggaggaggggtaaaggtcacgatgggttgtaccaaggattgagcacagccactaaagatacctatgatgcgctccacatgcaggccctgccgccaagacgcgccaagagaagcggatctggcgtgaagcagaccctgaatttcgacctgctgaagctggctggcgacgtggaatccaacccaggcccttctagaatgtaccggatgcagctgctgagctgtatcgccctgtctctggccctggtcacaaatagcgcccctaccagcagcagcaccaagaaaacccagctgcaactggaacacctcctgctggacctccagatgatcctgaacggcatcaacaactacaagaaccccaagctgacccggatgctgaccttcaagttctacatgcccaagaaggccaccgagctgaagcacctccagtgcctggaagaggaactgaagcccctggaagaagtgctgaatctggcccagagcaagaacttccacctgaggccaagggacctgatctccaacatcaacgtgatcgtgctggaactgaaaggcagcgagacaaccttcatgtgcgagtacgccgacgagacagctaccatcgtggaatttctgaatcggtggatcaccttctgccagagcatcatcagcaccctgacacatatgttgcagatggctgggcagtgctcccaaaatgaatattttgacagtttgttgcatgcttgcataccttgtcaacttcgatgttcttctaatactcctcctctaacatgtcagcgttattgtaatgcaagtgtgaccaattcagtgaaaggaacgaatgcgattctctggacctgtttgggactgagcttaataatttctttggcagttttcgtgctaatgtttttgctaaggaagtaa

SEQ ID NO: 7739 - DNA, 2148 bp, Artificial Sequence
  Synthetic Polynucleotide
atggccttaccagtgaccgccttgctcctgccgctggccttgctgctccacgccgccaggccggacatccagatgacacagagccctagcagcctgtctgccagcgtgggagacagagtgaccatcacatgcaaggccagcgaccacatcaacaactggctggcctggtatcagcagaagcctggacaggcccctaagctgctgatctacggcgctaccacactggaaacaggcgtgcccagcagattttctggcagcggctctggcaccgactacaccctgacaatatccagcctccagcctgaggacttcgccacctactactgtcagcagagctggaacaccccttggacattcggccagggcaccaagctggaaatcaagagaggcggaggcggaagtggaggcggaggatctggcggcggaggctctcaagttcagcttcaacagcctggcgctgagctggtcaaacctggcgcttctgtgaagatgagctgcaaagccagcggctacgccttcagcagctactggatcaactggatgaagcagaaacccggccagggactcgaatggatcggccaaatctatcccggcgacggcgacaccaactacaacggcaagttcaagggcagagccacactgaccgccgatacctctagcagcacagcctacatgcagctgagcagcctgaccagcgaagatagcgccgtgtacttctgtgcccggtccatcacaacagtcgtgggctgcgctatggactattggggccagggaacaagcgtgaccgtgtctagtacgcgtaaaattgaagttatgtatcctcctccttacctagacaatgagaagagcaatggaaccattatccatgtgaaaggggcgcgtaagtctgtgcgcttttacctggtcgtcagccctgccagtgcctccactcagacatcttggaccccaagggaccttgtgtcctctcagacacagacacagtcctgcgtgccaccaactgctggcgcaagacaggctccagagtctcccagcacaatccccgtcccttctcagccccagaactccacacttaggccaggaccagctgctccaatcgcactggtcccagtgttctgcggactgctggttgccaagtctctggtgctgagcgcactcctcgtttggtggggcgatatttggtggaaaacgatgatggaattgagatccctcgatacgcagaaagccacatgccaccttcagcaagtcacagacttgccttggaccagcgtcagctctcccgtggaacgggaaattctgtatcatacagtggcccgcaccaagatttccgacgatgacgacgagcacacactgcgcgccaagagaagcggatctggcgtgaagcagaccctgaatttcgacctgctgaagctggctggcgacgtggaatccaacccaggcccttctagaatgtaccggatgcagctgctgagctgtatcgccctgtctctggccctggtcacaaatagcgcccctaccagcagcagcaccaagaaaacccagctgcaactggaacacctcctgctggacctccagatgatcctgaacggcatcaacaactacaagaaccccaagctgacccggatgctgaccttcaagttctacatgcccaagaaggccaccgagctgaagcacctccagtgcctggaagaggaactgaagcccctggaagaagtgctgaatctggcccagagcaagaacttccacctgaggccaagggacctgatctccaacatcaacgtgatcgtgctggaactgaaaggcagcgagacaaccttcatgtgcgagtacgccgacgagacagctaccatcgtggaatttctgaatcggtggatcaccttctgccagagcatcatcagcaccctgacacatatgttgcagatggctgggcagtgctcccaaaatgaatattttgacagtttgttgcatgcttgcataccttgtcaacttcgatgttcttctaatactcctcctctaacatgtcagcgttattgtaatgcaagtgtgaccaattcagtgaaaggaacgaatgcgattctctggacctgtttgggactgagcttaataatttctttggcagttttcgtgctaatgtttttgctaaggaagtaa

SEQ ID NO: 7740 - DNA, 1959 bp, Artificial Sequence
  Synthetic Polynucleotide
atggccttaccagtgaccgccttgctcctgccgctggccttgctgctccacgccgccaggccggacatccagatgacacagagccctagcagcctgtctgccagcgtgggagacagagtgaccatcacatgcaaggccagcgaccacatcaacaactggctggcctggtatcagcagaagcctggacaggcccctaagctgctgatctacggcgctaccacactggaaacaggcgtgcccagcagattttctggcagcggctctggcaccgactacaccctgacaatatccagcctccagcctgaggacttcgccacctactactgtcagcagagctggaacaccccttggacattcggccagggcaccaagctggaaatcaagagaggcggaggcggaagtggaggcggaggatctggcggcggaggctctcaagttcagcttcaacagcctggcgctgagctggtcaaacctggcgcttctgtgaagatgagctgcaaagccagcggctacgccttcagcagctactggatcaactggatgaagcagaaacccggccagggactcgaatggatcggccaaatctatcccggcgacggcgacaccaactacaacggcaagttcaagggcagagccacactgaccgccgatacctctagcagcacagcctacatgcagctgagcagcctgaccagcgaagatagcgccgtgtacttctgtgcccggtccatcacaacagtcgtgggctgcgctatggactattggggccagggaacaagcgtgaccgtgtctagtacgcgtaaaattgaagttatgtatcctcctccttacctagacaatgagaagagcaatggaaccattatccatgtgaaaggggcgcgtggcgatattgagaatacctctctggccccagaagatcctacattccccgccgacacatggggaacatatctgctgacaaccgaaaccgggctgcaaaaggaccatgctctgtgggatcataccgctcagaatctgcttcggatggggcttgcattcctggtcctggtggctcttgtctggtttctggtcgaggactggctgtcccggaagagaaccagagaaagagcttccagggccagcacctgggaaggcagacgcagactgaatactcagaccctgcgcgccaagagaagcggatctggcgtgaagcagaccctgaatttcgacctgctgaagctggctggcgacgtggaatccaacccaggcccttctagaatgtaccggatgcagctgctgagctgtatcgccctgtctctggccctggtcacaaatagcgcccctaccagcagcagcaccaagaaaacccagctgcaactggaacacctcctgctggacctccagatgatcctgaacggcatcaacaactacaagaaccccaagctgacccggatgctgaccttcaagttctacatgcccaagaaggccaccgagctgaagcacctccagtgcctggaagaggaactgaagcccctggaagaagtgctgaatctggcccagagcaagaacttccacctgaggccaagggacctgatctccaacatcaacgtgatcgtgctggaactgaaaggcagcgagacaaccttcatgtgcgagtacgccgacgagacagctaccatcgtggaatttctgaatcggtggatcaccttctgccagagcatcatcagcaccctgacacatatgttgcagatggctgggcagtgctcccaaaatgaatattttgacagtttgttgcatgcttgcataccttgtcaacttcgatgttcttctaatactcctcctctaacatgtcagcgttattgtaatgcaagtgtgaccaattcagtgaaaggaacgaatgcgattctctggacctgtttgggactgagcttaataatttctttggcagttttcgtgctaatgtttttgctaaggaagtaa

SEQ ID NO: 7741 - DNA, 1830 bp, Artificial Sequence; identical to SEQ ID NO: 7686
  Synthetic Polynucleotide

SEQ ID NO: 7742 - DNA, 2889 bp, Artificial Sequence
  Synthetic Polynucleotide
atgggctggatcagaggcagaagaagcagacacagctgggagatgagcgagttccacaactacaacctggacctgaagaagtccgacttcagcacccggtggcagaaacagagatgccccgtggtcaagagcaagtgcagagagaacgcaagccccttcttcttctgttgctttatcgccgtggctatgggcatccgcttcatcatcatggtggctatttggagcgccgtgttcctgaactccctgttcaatcaagaggtgcagatccctctgaccgagagctactgtggcccctgtcctaagaactggatctgctacaagaacaactgctaccagttcttcgacgagagcaagaattggtacgagagccaggccagctgcatgagccagaatgccagcctgctgaaggtgtacagcaaagaggaccaggacctgctgaaactggtcaagtcctaccactggatgggccttgtgcacatccccaccaatggctcttggcagtgggaggacggcagcattctgagccctaacctgctgaccatcatcgagatgcagaagggcgactgcgccctgtacgccagcagctttaagggctacatcgagaattgcagcaccccgaacacctacatctgtatgcagagaaccgttggcggaggcggatctggcggcggaggtagcggtggcggaggatctgaattcgacatccagatgacacagagccctagcagcctgtctgccagcgtgggagacagagtgaccatcacatgcaaggccagcgaccacatcaacaactggctggcctggtatcagcagaagcctggacaggcccctaagctgctgatctacggcgctaccacactggaaacaggcgtgcccagcagattttctggcagcggctctggcaccgactacaccctgacaatatccagcctccagcctgaggacttcgccacctactactgtcagcagagctggaacaccccttggacattcggccagggcaccaagctggaaatcaagagactcgagagggccaagcgatctggatctggagcaacaaacttctcactactcaaacaagcaggtgacgtggaggagaatcccgggcctactagtaccatgggatggattaggggaagaagatcccggcactcttgggagatgtctgagtttcataattacaacctcgatctgaaaaagagcgacttttccacgcggtggcaaaagcagcggtgccctgtcgtgaagtccaagtgtcgggaaaacgccagtccattcttcttttgctgtttcattgccgtcgcaatggggatcagattcattattatggtcgcaatttggagtgctgtctttctgaacagcctctttaatcaagaagtccagattccgctcaccgaatcctactgcggaccttgtccaaaaaattggatttgttacaaaaacaactgttatcaattctttgatgagtctaaaaattggtatgagtcccaggcttcctgcatgtctcagaacgcttctctgctgaaagtctactctaaagaagatcaggatctcctgaagctcgtcaagagctatcattggatggggctcgtccacattcctaccaacggaagctggcaatgggaagatggctccatcctgtctccaaatctgctcacgattattgaaatgcagaaaggggattgtgctctctacgccagctccttcaagggatatattgagaactgtagcacgcccaatacttatatctgtatgcaacggaccgtgggcggcggaggatctggcggaggcggatctgggggcggaggctctttcgaacaagttcagcttcaacagcctggcgctgagctggtcaaacctggcgcttctgtgaagatgagctgcaaagccagcggctacgccttcagcagctactggatcaactggatgaagcagaaacccggccagggactcgaatggatcggccaaatctatcccggcgacggcgacaccaactacaacggcaagttcaagggcagagccacactgaccgccgatacctctagcagcacagcctacatgcagctgagcagcctgaccagcgaagatagcgccgtgtacttctgtgcccggtccatcacaacagtcgtgggctgcgctatggactattggggccagggaacaagcgtgaccgtgtctagtacgcgtcgcgccaagagaagcggatctggcgtgaagcagaccctgaatttcgacctgctgaagctggctggcgacgtggaatccaacccaggcccttctagaggccatatgaccgagtacaagcccacggtgcgcctcgccacccgcgacgacgtccccagggccgtacgcaccctcgccgccgcgttcgccgactaccccgccacgcgccacaccgtcgatccggaccgccacatcgagcgggtcaccgagctgcaagaactcttcctcacgcgcgtcgggctcgacatcggcaaggtgtgggtcgcggacgacggcgccgcggtggcggtctggaccacgccggagagcgtcgaagcgggggcggtgttcgccgagatcggcccgcgcatggccgagttgagcggttcccggctggccgcgcagcaacagatggaaggcctcctggcgccgcaccggcccaaggagcccgcgtggttcctggccaccgtcggcgtctcgcccgaccaccagggcaagggtctgggcagcgccgtcgtgctccccggagtggaggcggccgagcgcgccggggtgcccgccttcctggagacctccgcgccccgcaacctccccttctacgagcggctcggcttcaccgtcaccgccgacgtcgaggtgcccgaaggaccgcgcacctggtgcatgacccgcaagcccggtgcctga

SEQ ID NO: 7743 - DNA, 2604 bp, Artificial Sequence
  Synthetic Polynucleotide
atgaacaagcagcggggcacctacagcgaagtgtctctggctcaggaccccaagcggcagcagagaaagctgaagggcaacaagagcagcatcagcggcaccaagcaagagattttccaggtggaactgaacctccagaacgccagcagcgaccaccagggcaacgataagacctaccactgcaagggcctgctgcctcctccagagaaactgacagctgaggtgctgggcatcatctgcatcgtgctgatggctaccgtgctgaaaaccattgtgctgatcccttgcatcggcgtgctggaacagaacagcttcagcctgaaccggcggatgcagaaggccagacactgcggacactgtcccgaggaatggatcacctactccaacagctgctactacatcggcaaagagcggcggacctgggaagaacgagtgtgttggcctgtgctgcggagaaccctgatctgctttctgggtggcggtggctcgggcggtggtgggtcgggtggcggcggatctgaattcgacatccagatgacacagagccctagcagcctgtctgccagcgtgggagacagagtgaccatcacatgcaaggccagcgaccacatcaacaactggctggcctggtatcagcagaagcctggacaggcccctaagctgctgatctacggcgctaccacactggaaacaggcgtgcccagcagattttctggcagcggctctggcaccgactacaccctgacaatatccagcctccagcctgaggacttcgccacctactactgtcagcagagctggaacaccccttggacattcggccagggcaccaagctggaaatcaagagactcgagagggccaagcgatctggatctggagcaacaaacttctcactactcaaacaagcaggtgacgtggaggagaatcccgggcctactagtaccatggccgtgttcaagaccacactgtggcggctgatctctggcaccctgggcatcatctgtctgagcctgatgtccacactgggcatcctgctgaagaacagcttcaccaagctgagcatcgagcccgccttcacacccggacctaacatcgaactccagaaggacagcgactgctgctcctgccaagagaaatgggtcggatacagatgcaactgctacttcatcagcagcgagcagaaaacctggaacgagagcagacacctgtgcgccagccagaagtctagcctgctccagctccagaacaccgacgagctggacttcatgtccagcagccagcagttctactggatcggcctgagctacagcgaggaacacacagcttggctgtgggagaatggcagcgccctgagccagtacctgtttcctagcttcgagacattcaacaccaagaactgtatcgcctacaatcccaacggcaacgccctggatgagagctgcgaggacaagaatcggtacatctgcaagcagcagctgatcggcggtggcggttcaggtggagggggaagcggtggtggtggctcattcgaacaagttcagcttcaacagcctggcgctgagctggtcaaacctggcgcttctgtgaagatgagctgcaaagccagcggctacgccttcagcagctactggatcaactggatgaagcagaaacccggccagggactcgaatggatcggccaaatctatcccggcgacggcgacaccaactacaacggcaagttcaagggcagagccacactgaccgccgatacctctagcagcacagcctacatgcagctgagcagcctgaccagcgaagatagcgccgtgtacttctgtgcccggtccatcacaacagtcgtgggctgcgctatggactattggggccagggaacaagcgtgaccgtgtctagtacgcgtcgcgccaagagaagcggatctggcgtgaagcagaccctgaatttcgacctgctgaagctggctggcgacgtggaatccaacccaggcccttctagaggccatatgaccgagtacaagcccacggtgcgcctcgccacccgcgacgacgtccccagggccgtacgcaccctcgccgccgcgttcgccgactaccccgccacgcgccacaccgtcgatccggaccgccacatcgagcgggtcaccgagctgcaagaactcttcctcacgcgcgtcgggctcgacatcggcaaggtgtgggtcgcggacgacggcgccgcggtggcggtctggaccacgccggagagcgtcgaagcgggggcggtgttcgccgagatcggcccgcgcatggccgagttgagcggttcccggctggccgcgcagcaacagatggaaggcctcctggcgccgcaccggcccaaggagcccgcgtggttcctggccaccgtcggcgtctcgcccgaccaccagggcaagggtctgggcagcgccgtcgtgctccccggagtggaggcggccgagcgcgccggggtgcccgccttcctggagacctccgcgccccgcaacctccccttctacgagcggctcggcttcaccgtcaccgccgacgtcgaggtgcccgaaggaccgcgcacctggtgcatgacccgcaagcccggtgcctga

SEQ ID NO: 7744 - DNA, 2901 bp, Artificial Sequence
  Synthetic Polynucleotide
atgaacaagcagcggggcaccttcagcgaagtgtctctggctcaggaccccaagcctcagcagagaaagcccaagggcaacaagagcagcatcagcggcaccgagcaagagattttccaggtggaactgaacctccagaacgccagcctgaaccaccagggcatcgacaaaatctacgactgccagggcctgctgcctcctccagaaaaactgacagccgaggtgctgggcatcatctgcatcgtgctgatggctaccgtgctgaaaacgattgtgctgatcccattcctggaacagaacaacagcagccccaacacacggacccagaaggctagaccttgcggacactgtcccgaggaatggatcacctacagcaacagctgctactacatcggcaaagagcggcggacctgggaagagtctcttcaggcttgcgccagcaagaacagcagctccctgctgtccatcgacaacgaggaagagatgaagttcctggcctccatcctgcctagcagctggatcggcgtgttcagaaacagctcccaccatccttgggtcaccatcaacggcctggccttcaagcacgaaatcaaggacagcgaccacgccgagagaaactgcgccatgcttcatgtgcggggcctgatctccgatcagtgtggcagcagcagaatcatcgtgtccatcagcttcaggatcaaggccctggaactggccgtgcaccagatcaagttctacatctgctccaaccggaacgacattatgatcgccggtggcggtggctcgggcggtggtgggtcgggtggcggcggatctgaattcgacatccagatgacacagagccctagcagcctgtctgccagcgtgggagacagagtgaccatcacatgcaaggccagcgaccacatcaacaactggctggcctggtatcagcagaagcctggacaggcccctaagctgctgatctacggcgctaccacactggaaacaggcgtgcccagcagattttctggcagcggctctggcaccgactacaccctgacaatatccagcctccagcctgaggacttcgccacctactactgtcagcagagctggaacaccccttggacattcggccagggcaccaagctggaaatcaagagactcgagagggccaagcgatctggatctggagcaacaaacttctcactactcaaacaagcaggtgacgtggaggagaatcccgggcctactagtaccatggccgtgttcaagaccacactgtggcggctgatctctggcaccctgggcatcatctgtctgagcctgatgtccacactgggcatcctgctgaagaacagcttcaccaagctgagcatcgagcccgccttcacacccggacctaacatcgaactccagaaggacagcgactgctgctcctgccaagagaaatgggtcggatacagatgcaactgctacttcatcagcagcgagcagaaaacctggaacgagagcagacacctgtgcgccagccagaagtctagcctgctccagctccagaacaccgacgagctggacttcatgtccagcagccagcagttctactggatcggcctgagctacagcgaggaacacacagcttggctgtgggagaatggcagcgccctgagccagtacctgtttcctagcttcgagacattcaacaccaagaactgtatcgcctacaatcccaacggcaacgccctggatgagagctgcgaggacaagaatcggtacatctgcaagcagcagctgatcggcggtggcggttcaggtggagggggaagcggtggtggtggctcattcgaacaagttcagcttcaacagcctggcgctgagctggtcaaacctggcgcttctgtgaagatgagctgcaaagccagcggctacgccttcagcagctactggatcaactggatgaagcagaaacccggccagggactcgaatggatcggccaaatctatcccggcgacggcgacaccaactacaacggcaagttcaagggcagagccacactgaccgccgatacctctagcagcacagcctacatgcagctgagcagcctgaccagcgaagatagcgccgtgtacttctgtgcccggtccatcacaacagtcgtgggctgcgctatggactattggggccagggaacaagcgtgaccgtgtctagtacgcgtcgcgccaagagaagcggatctggcgtgaagcagaccctgaatttcgacctgctgaagctggctggcgacgtggaatccaacccaggcccttctagaggccatatgaccgagtacaagcccacggtgcgcctcgccacccgcgacgacgtccccagggccgtacgcaccctcgccgccgcgttcgccgactaccccgccacgcgccacaccgtcgatccggaccgccacatcgagcgggtcaccgagctgcaagaactcttcctcacgcgcgtcgggctcgacatcggcaaggtgtgggtcgcggacgacggcgccgcggtggcggtctggaccacgccggagagcgtcgaagcgggggcggtgttcgccgagatcggcccgcgcatggccgagttgagcggttcccggctggccgcgcagcaacagatggaaggcctcctggcgccgcaccggcccaaggagcccgcgtggttcctggccaccgtcggcgtctcgcccgaccaccagggcaagggtctgggcagcgccgtcgtgctccccggagtggaggcggccgagcgcgccggggtgcccgccttcctggagacctccgcgccccgcaacctccccttctacgagcggctcggcttcaccgtcaccgccgacgtcgaggtgcccgaaggaccgcgcacctggtgcatgacccgcaagcccggtgcctga

SEQ ID NO: 7745 - DNA, 2829 bp, Artificial Sequence
  Synthetic Polynucleotide
atggacaaccagggcgtgatctacagcgacctgaacctgcctcctaatcctaagcggcagcagagaaagcccaagggcaacaagagcagcatcctggctaccgagcaagagatcacctacgccgagctgaacctccagaaggccagccaggatttccagggcaacgacaagacctaccactgcaaggacctgcctagcgcacccgagaagctgatcgttggcatcctgggcatcatctgcctgatcctgatggcctccgtggtcaccatcgtggtcatccccagcacactgatccagcggcacaacaacagcagcctgaacaccagaacacagaaggcccggcactgcggccactgtcctgaagagtggatcacatacagcaacagctgctactacatcggcaaagagcggcggacctgggaagaatctctgctggcctgcaccagcaagaacagctccctgctgagcatcgacaacgaggaagagatgaagttcctgtccatcatcagccccagcagctggatcggcgtgttcagaaactccagccaccatccttgggtcaccatgaacggcctggccttcaagcacgaaatcaaggacagcgacaacgccgaactgaattgcgccgtgctgcaagtgaaccggctgaagtctgcccagtgtggcagcagcatcatctatcactgcaagcacaagctgggtggcggtggctcgggcggtggtgggtcgggtggcggcggatctgaattcgacatccagatgacacagagccctagcagcctgtctgccagcgtgggagacagagtgaccatcacatgcaaggccagcgaccacatcaacaactggctggcctggtatcagcagaagcctggacaggcccctaagctgctgatctacggcgctaccacactggaaacaggcgtgcccagcagattttctggcagcggctctggcaccgactacaccctgacaatatccagcctccagcctgaggacttcgccacctactactgtcagcagagctggaacaccccttggacattcggccagggcaccaagctggaaatcaagagactcgagagggccaagcgatctggatctggagcaacaaacttctcactactcaaacaagcaggtgacgtggaggagaatcccgggcctactagtaccatggccgtgttcaagaccacactgtggcggctgatctctggcaccctgggcatcatctgtctgagcctgatgtccacactgggcatcctgctgaagaacagcttcaccaagctgagcatcgagcccgccttcacacccggacctaacatcgaactccagaaggacagcgactgctgctcctgccaagagaaatgggtcggatacagatgcaactgctacttcatcagcagcgagcagaaaacctggaacgagagcagacacctgtgcgccagccagaagtctagcctgctccagctccagaacaccgacgagctggacttcatgtccagcagccagcagttctactggatcggcctgagctacagcgaggaacacacagcttggctgtgggagaatggcagcgccctgagccagtacctgtttcctagcttcgagacattcaacaccaagaactgtatcgcctacaatcccaacggcaacgccctggatgagagctgcgaggacaagaatcggtacatctgcaagcagcagctgatcggcggtggcggttcaggtggagggggaagcggtggtggtggctcattcgaacaagttcagcttcaacagcctggcgctgagctggtcaaacctggcgcttctgtgaagatgagctgcaaagccagcggctacgccttcagcagctactggatcaactggatgaagcagaaacccggccagggactcgaatggatcggccaaatctatcccggcgacggcgacaccaactacaacggcaagttcaagggcagagccacactgaccgccgatacctctagcagcacagcctacatgcagctgagcagcctgaccagcgaagatagcgccgtgtacttctgtgcccggtccatcacaacagtcgtgggctgcgctatggactattggggccagggaacaagcgtgaccgtgtctagtacgcgtcgcgccaagagaagcggatctggcgtgaagcagaccctgaatttcgacctgctgaagctggctggcgacgtggaatccaacccaggcccttctagaggccatatgaccgagtacaagcccacggtgcgcctcgccacccgcgacgacgtccccagggccgtacgcaccctcgccgccgcgttcgccgactaccccgccacgcgccacaccgtcgatccggaccgccacatcgagcgggtcaccgagctgcaagaactcttcctcacgcgcgtcgggctcgacatcggcaaggtgtgggtcgcggacgacggcgccgcggtggcggtctggaccacgccggagagcgtcgaagcgggggcggtgttcgccgagatcggcccgcgcatggccgagttgagcggttcccggctggccgcgcagcaacagatggaaggcctcctggcgccgcaccggcccaaggagcccgcgtggttcctggccaccgtcggcgtctcgcccgaccaccagggcaagggtctgggcagcgccgtcgtgctccccggagtggaggcggccgagcgcgccggggtgcccgccttcctggagacctccgcgccccgcaacctccccttctacgagcggctcggcttcaccgtcaccgccgacgtcgaggtgcccgaaggaccgcgcacctggtgcatgacccgcaagcccggtgcctga

SEQ ID NO: 7746 - DNA, 2133 bp, Artificial Sequence
  Synthetic Polynucleotide
atggccttaccagtgaccgccttgctcctgccgctggccttgctgctccacgccgccaggccgcaggccgtggttacacaagagcctagcctgacagtgtcccctggcggaacagtgaccctgacctgtagatcctctaccggcgctgtgaccaccagcaactatgccaactgggtgcagcagaagcctggacaggctcccagaggactgatcggcggcacaaacaaaagagccccttggacacccgccagattcagcggatcactgctcggaggaaaggccgctctgacactgtctggtgtccagcctgaggacgaggccgagtattattgcgccctgtggtacagcaaccacctggtgtttggcggaggcaccaagctgacagttcttggcggaggcggaagtggaggcggaggatctggcggcggaggctctgaagttcagctggttgaatcaggcggtggcctggttcaacctggcggatctctgagactgagctgtgccgccagcggctttagcctgagcagaaattctgtgcactgggtccgacaggcccctggcaaaggacttgagtgggtcggaatgatctggggaggcggcagcaccgattacaacagcgccctgaagtcccggttcaccatcagcagagacaacagcaagaacaccctgtacctccagatgaacagcctgagagccgaggacaccgccgtgtactactgtgccagaaacggcggctacgacgtgttccactattggggccagggaaccaccgtgaccgttagctctacgcgtaccacgacgccagcgccgcgaccaccaacaccggcgcccaccatcgcgtcgcagcccctgtccctgcgcccagaggcgtgccggccagcggcggggggcgcagtgcacacgagggggctggacttcgcctgtgacatctacatctgggcgcccttggccgggacttgtggggtccttctcctgtcactggttatcaccctttactgcaaacggggcagaaagaaactcctgtatatattcaaacaaccatttatgagaccagtacaaactactcaagaggaagatggctgtagctgccgatttccagaagaagaagaaggaggatgtgaactgagagtgaagttcagcaggagcgcagacgcccccgcgtaccagcagggccagaaccagctctataacgagctgaatctaggacgaagagaggagtacgatgttttggacaagagacgtggccgggaccctgagatggggggaaagccgagaaggaagaaccctcaggaaggcctgtacaatgaactgcagaaagataagatggcggaggcctacagtgagattgggatgaaaggcgagcgccggaggggcaaggggcacgatggcctttaccagggtctcagtacagccaccaaggacacctacgacgcccttcacatgcaggccctgccccctcgctctagtggctccggcgagggcagaggaagtctactaacctgcggagatgtggaagaaaatcctggcccacatatgaccgagtacaagcccacggtgcgcctcgccacccgcgacgacgtccccagggccgtacgcaccctcgccgccgcgttcgccgactaccccgccacgcgccacaccgtcgatccggaccgccacatcgagcgggtcaccgagctgcaagaactcttcctcacgcgcgtcgggctcgacatcggcaaggtgtgggtcgcggacgacggcgccgcggtggcggtctggaccacgccggagagcgtcgaagcgggggcggtgttcgccgagatcggcccgcgcatggccgagttgagcggttcccggctggccgcgcagcaacagatggaaggcctcctggcgccgcaccggcccaaggagcccgcgtggttcctggccaccgtcggcgtctcgcccgaccaccagggcaagggtctgggcagcgccgtcgtgctccccggagtggaggcggccgagcgcgccggggtgcccgccttcctggagacctccgcgccccgcaacctccccttctacgagcggctcggcttcaccgtcaccgccgacgtcgaggtgcccgaaggaccgcgcacctggtgcatgacccgcaagcccggtgcctga

SEQ ID NO: 7747 - DNA, 2133 bp, Artificial Sequence
  Synthetic Polynucleotide
atggccttaccagtgaccgccttgctcctgccgctggccttgctgctccacgccgccaggccgcaggccgtggtcacacaagaaagcgccctgacaacaagccctggcgagacagtgaccctgacctgtagatcctctaccggcgctgtgaccaccagcaactatgccaactgggtgcaagagaagcccgaccacctgttcacaggactgatcggcggcaccaacaatagagcacctggcgtgccagccagattcagcggatctctgatcggagacaaggccgcactgaccatcacaggcgctcagacagaggacgaggccatctacttttgcgccctgtggtacagcaaccacctggtgtttggcggaggcaccaagctgacagttcttggcggaggcggaagtggaggcggaggatctggcggcggaggctctgaagtgaagctgcaagagtctggccctggactggtggccccatctcagagcctgagctttacctgtaccgtgtccggcttcagcctgagcagaaacagcgtgcactgggtccgacagcctccaggcaaaggactggaatggctgggcatgatttggggaggcggcagcaccgattacaactctgccctgaagtcccggctgaacatcagcaaggacagcagcaagagccaggtgttcctgaagatgaactccctccagaccgacgacaccgccatgtatttctgcgccagaaacggcggctacgacgtgttccactattggggccagggcaccaccgtgacagtctcttctacgcgtaccacgacgccagcgccgcgaccaccaacaccggcgcccaccatcgcgtcgcagcccctgtccctgcgcccagaggcgtgccggccagcggcggggggcgcagtgcacacgagggggctggacttcgcctgtgacatctacatctgggcgcccttggccgggacttgtggggtccttctcctgtcactggttatcaccctttactgcaaacggggcagaaagaaactcctgtatatattcaaacaaccatttatgagaccagtacaaactactcaagaggaagatggctgtagctgccgatttccagaagaagaagaaggaggatgtgaactgagagtgaagttcagcaggagcgcagacgcccccgcgtaccagcagggccagaaccagctctataacgagctgaatctaggacgaagagaggagtacgatgttttggacaagagacgtggccgggaccctgagatggggggaaagccgagaaggaagaaccctcaggaaggcctgtacaatgaactgcagaaagataagatggcggaggcctacagtgagattgggatgaaaggcgagcgccggaggggcaaggggcacgatggcctttaccagggtctcagtacagccaccaaggacacctacgacgcccttcacatgcaggccctgccccctcgctctagtggctccggcgagggcagaggaagtctactaacctgcggagatgtggaagaaaatcctggcccacatatgaccgagtacaagcccacggtgcgcctcgccacccgcgacgacgtccccagggccgtacgcaccctcgccgccgcgttcgccgactaccccgccacgcgccacaccgtcgatccggaccgccacatcgagcgggtcaccgagctgcaagaactcttcctcacgcgcgtcgggctcgacatcggcaaggtgtgggtcgcggacgacggcgccgcggtggcggtctggaccacgccggagagcgtcgaagcgggggcggtgttcgccgagatcggcccgcgcatggccgagttgagcggttcccggctggccgcgcagcaacagatggaaggcctcctggcgccgcaccggcccaaggagcccgcgtggttcctggccaccgtcggcgtctcgcccgaccaccagggcaagggtctgggcagcgccgtcgtgctccccggagtggaggcggccgagcgcgccggggtgcccgccttcctggagacctccgcgccccgcaacctccccttctacgagcggctcggcttcaccgtcaccgccgacgtcgaggtgcccgaaggaccgcgcacctggtgcatgacccgcaagcccggtgcctga

SEQ ID NO: 7748 - DNA, 327 bp, Artificial Sequence
  Synthetic Polynucleotide
caggccgtggttacacaagagcctagcctgacagtgtcccctggcggaacagtgaccctgacctgtagatcctctaccggcgctgtgaccaccagcaactatgccaactgggtgcagcagaagcctggacaggctcccagaggactgatcggcggcacaaacaaaagagccccttggacacccgccagattcagcggatcactgctcggaggaaaggccgctctgacactgtctggtgtccagcctgaggacgaggccgagtattattgcgccctgtggtacagcaaccacctggtgtttggcggaggcaccaagctgacagttctt

SEQ ID NO: 7749 - DNA, 351 bp, Artificial Sequence
  Synthetic Polynucleotide
gaagttcagctggttgaatcaggcggtggcctggttcaacctggcggatctctgagactgagctgtgccgccagcggctttagcctgagcagaaattctgtgcactgggtccgacaggcccctggcaaaggacttgagtgggtcggaatgatctggggaggcggcagcaccgattacaacagcgccctgaagtcccggttcaccatcagcagagacaacagcaagaacaccctgtacctccagatgaacagcctgagagccgaggacaccgccgtgtactactgtgccagaaacggcggctacgacgtgttccactattggggccagggaaccaccgtgaccgttagctct

SEQ ID NO: 7750 - DNA, 723 bp, Artificial Sequence
  Synthetic Polynucleotide
caggccgtggttacacaagagcctagcctgacagtgtcccctggcggaacagtgaccctgacctgtagatcctctaccggcgctgtgaccaccagcaactatgccaactgggtgcagcagaagcctggacaggctcccagaggactgatcggcggcacaaacaaaagagccccttggacacccgccagattcagcggatcactgctcggaggaaaggccgctctgacactgtctggtgtccagcctgaggacgaggccgagtattattgcgccctgtggtacagcaaccacctggtgtttggcggaggcaccaagctgacagttcttggcggaggcggaagtggaggcggaggatctggcggcggaggctctgaagttcagctggttgaatcaggcggtggcctggttcaacctggcggatctctgagactgagctgtgccgccagcggctttagcctgagcagaaattctgtgcactgggtccgacaggcccctggcaaaggacttgagtgggtcggaatgatctggggaggcggcagcaccgattacaacagcgccctgaagtcccggttcaccatcagcagagacaacagcaagaacaccctgtacctccagatgaacagcctgagagccgaggacaccgccgtgtactactgtgccagaaacggcggctacgacgtgttccactattggggccagggaaccaccgtgaccgttagctct

SEQ ID NO: 7751 - DNA, 327 bp, Artificial Sequence
  Synthetic Polynucleotide
caggccgtggtcacacaagaaagcgccctgacaacaagccctggcgagacagtgaccctgacctgtagatcctctaccggcgctgtgaccaccagcaactatgccaactgggtgcaagagaagcccgaccacctgttcacaggactgatcggcggcaccaacaatagagcacctggcgtgccagccagattcagcggatctctgatcggagacaaggccgcactgaccatcacaggcgctcagacagaggacgaggccatctacttttgcgccctgtggtacagcaaccacctggtgtttggcggaggcaccaagctgacagttctt

SEQ ID NO: 7752 - DNA, 351 bp, Artificial Sequence
  Synthetic Polynucleotide
gaagtgaagctgcaagagtctggccctggactggtggccccatctcagagcctgagctttacctgtaccgtgtccggcttcagcctgagcagaaacagcgtgcactgggtccgacagcctccaggcaaaggactggaatggctgggcatgatttggggaggcggcagcaccgattacaactctgccctgaagtcccggctgaacatcagcaaggacagcagcaagagccaggtgttcctgaagatgaactccctccagaccgacgacaccgccatgtatttctgcgccagaaacggcggctacgacgtgttccactattggggccagggcaccaccgtgacagtctcttct

SEQ ID NO: 7753 - DNA, 723 bp, Artificial Sequence
  Synthetic Polynucleotide
caggccgtggtcacacaagaaagcgccctgacaacaagccctggcgagacagtgaccctgacctgtagatcctctaccggcgctgtgaccaccagcaactatgccaactgggtgcaagagaagcccgaccacctgttcacaggactgatcggcggcaccaacaatagagcacctggcgtgccagccagattcagcggatctctgatcggagacaaggccgcactgaccatcacaggcgctcagacagaggacgaggccatctacttttgcgccctgtggtacagcaaccacctggtgtttggcggaggcaccaagctgacagttcttggcggaggcggaagtggaggcggaggatctggcggcggaggctctgaagtgaagctgcaagagtctggccctggactggtggccccatctcagagcctgagctttacctgtaccgtgtccggcttcagcctgagcagaaacagcgtgcactgggtccgacagcctccaggcaaaggactggaatggctgggcatgatttggggaggcggcagcaccgattacaactctgccctgaagtcccggctgaacatcagcaaggacagcagcaagagccaggtgttcctgaagatgaactccctccagaccgacgacaccgccatgtatttctgcgccagaaacggcggctacgacgtgttccactattggggccagggcaccaccgtgacagtctcttct

SEQ ID NO: 7754 - DNA, 1482 bp, Artificial Sequence
  Synthetic Polynucleotide
atggccttaccagtgaccgccttgctcctgccgctggccttgctgctccacgccgccaggccgcaggccgtggttacacaagagcctagcctgacagtgtcccctggcggaacagtgaccctgacctgtagatcctctaccggcgctgtgaccaccagcaactatgccaactgggtgcagcagaagcctggacaggctcccagaggactgatcggcggcacaaacaaaagagccccttggacacccgccagattcagcggatcactgctcggaggaaaggccgctctgacactgtctggtgtccagcctgaggacgaggccgagtattattgcgccctgtggtacagcaaccacctggtgtttggcggaggcaccaagctgacagttcttggcggaggcggaagtggaggcggaggatctggcggcggaggctctgaagttcagctggttgaatcaggcggtggcctggttcaacctggcggatctctgagactgagctgtgccgccagcggctttagcctgagcagaaattctgtgcactgggtccgacaggcccctggcaaaggacttgagtgggtcggaatgatctggggaggcggcagcaccgattacaacagcgccctgaagtcccggttcaccatcagcagagacaacagcaagaacaccctgtacctccagatgaacagcctgagagccgaggacaccgccgtgtactactgtgccagaaacggcggctacgacgtgttccactattggggccagggaaccaccgtgaccgttagctctacgcgtgagcagaaactgatctcggaagaggatctgaaaattgaagttatgtatcctcctccttacctagacaatgagaagagcaatggaaccattatccatgtgaaagggaaacacctttgtccaagtcccctatttcccggaccttctaagcccttttgggtgctggtggtggttgggggagtcctggcttgctatagcttgctagtaacagtggcctttattattttctgggtgaggagtaagaggagcaggctcctgcacagtgactacatgaacatgactccacgccgccccggacccacccgcaagcattaccagccctatgccccaccacgcgacttcgcagcctatcgctccagagtgaagttcagcaggagcgcagacgcccccgcgtaccagcagggccagaaccagctctataacgagctcaatctaggacgaagagaggagtacgatgttttggacaagagacgtggccgggaccctgagatggggggaaagccgagaaggaagaaccctcaggaaggcctgtacaatgaactgcagaaagataagatggcggaggcctacagtgagattgggatgaaaggcgagcgccggaggggcaaggggcacgatggcctttaccagggtctcagtacagccaccaaggacacctacgacgcccttcacatgcaggccctgccccctcgc

SEQ ID NO: 7755 - DNA, 1503 bp, Artificial Sequence
  Synthetic Polynucleotide
atggccttaccagtgaccgccttgctcctgccgctggccttgctgctccacgccgccaggccgcaggccgtggttacacaagagcctagcctgacagtgtcccctggcggaacagtgaccctgacctgtagatcctctaccggcgctgtgaccaccagcaactatgccaactgggtgcagcagaagcctggacaggctcccagaggactgatcggcggcacaaacaaaagagccccttggacacccgccagattcagcggatcactgctcggaggaaaggccgctctgacactgtctggtgtccagcctgaggacgaggccgagtattattgcgccctgtggtacagcaaccacctggtgtttggcggaggcaccaagctgacagttcttggcggaggcggaagtggaggcggaggatctggcggcggaggctctgaagttcagctggttgaatcaggcggtggcctggttcaacctggcggatctctgagactgagctgtgccgccagcggctttagcctgagcagaaattctgtgcactgggtccgacaggcccctggcaaaggacttgagtgggtcggaatgatctggggaggcggcagcaccgattacaacagcgccctgaagtcccggttcaccatcagcagagacaacagcaagaacaccctgtacctccagatgaacagcctgagagccgaggacaccgccgtgtactactgtgccagaaacggcggctacgacgtgttccactattggggccagggaaccaccgtgaccgttagctctacgcgtgagcagaaactgatctcggaagaggatctggcgaagcccaccacgacgccagcgccgcgaccaccaacaccggcgcccaccatcgcgtcgcagcccctgtccctgcgcccagaggcgtgccggccagcggcggggggcgcagtgcacacgagggggctggacttcgcctgtgacatctacatctgggcgcccttggccgggacttgtggggtccttctcctgtcactggttatcaccctttactgcaaacggggcagaaagaaactcctgtatatattcaaacaaccatttatgagaccagtacaaactactcaagaggaagatggctgtagctgccgatttccagaagaagaagaaggaggatgtgaactgagagtgaagttcagcaggagcgcagacgcccccgcgtaccagcagggccagaaccagctctataacgagctgaatctaggacgaagagaggagtacgatgttttggacaagagacgtggccgggaccctgagatggggggaaagccgagaaggaagaaccctcaggaaggcctgtacaatgaactgcagaaagataagatggcggaggcctacagtgagattgggatgaaaggcgagcgccggaggggcaaggggcacgatggcctttaccagggtctcagtacagccaccaaggacacctacgacgcccttcacatgcaggccctgccccctcgctga

SEQ ID NO: 7756 - DNA, 1503 bp, Artificial Sequence
  Synthetic Polynucleotide
atggccttaccagtgaccgccttgctcctgccgctggccttgctgctccacgccgccaggccggaagttcagctggttgaatcaggcggtggcctggttcaacctggcggatctctgagactgagctgtgccgccagcggctttagcctgagcagaaattctgtgcactgggtccgacaggcccctggcaaaggacttgagtgggtcggaatgatctggggaggcggcagcaccgattacaacagcgccctgaagtcccggttcaccatcagcagagacaacagcaagaacaccctgtacctccagatgaacagcctgagagccgaggacaccgccgtgtactactgtgccagaaacggcggctacgacgtgttccactattggggccagggaaccaccgtgaccgttagctctggcggaggcggaagtggaggcggaggatctggcggcggaggctctcaggccgtggttacacaagagcctagcctgacagtgtcccctggcggaacagtgaccctgacctgtagatcctctaccggcgctgtgaccaccagcaactatgccaactgggtgcagcagaagcctggacaggctcccagaggactgatcggcggcacaaacaaaagagccccttggacacccgccagattcagcggatcactgctcggaggaaaggccgctctgacactgtctggtgtccagcctgaggacgaggccgagtattattgcgccctgtggtacagcaaccacctggtgtttggcggaggcaccaagctgacagttcttacgcgtgagcagaaactgatctcggaagaggatctggcgaagcccaccacgacgccagcgccgcgaccaccaacaccggcgcccaccatcgcgtcgcagcccctgtccctgcgcccagaggcgtgccggccagcggcggggggcgcagtgcacacgagggggctggacttcgcctgtgacatctacatctgggcgcccttggccgggacttgtggggtccttctcctgtcactggttatcaccctttactgcaaacggggcagaaagaaactcctgtatatattcaaacaaccatttatgagaccagtacaaactactcaagaggaagatggctgtagctgccgatttccagaagaagaagaaggaggatgtgaactgagagtgaagttcagcaggagcgcagacgcccccgcgtaccagcagggccagaaccagctctataacgagctgaatctaggacgaagagaggagtacgatgttttggacaagagacgtggccgggaccctgagatggggggaaagccgagaaggaagaaccctcaggaaggcctgtacaatgaactgcagaaagataagatggcggaggcctacagtgagattgggatgaaaggcgagcgccggaggggcaaggggcacgatggcctttaccagggtctcagtacagccaccaaggacacctacgacgcccttcacatgcaggccctgccccctcgctga

SEQ ID NO: 7757 - DNA, 2742 bp, Artificial Sequence
  Synthetic Polynucleotide
atggccttaccagtgaccgccttgctcctgccgctggccttgctgctccacgccgccaggccgcaggccgtggttacacaagagcctagcctgacagtgtcccctggcggaacagtgaccctgacctgtagatcctctaccggcgctgtgaccaccagcaactatgccaactgggtgcagcagaagcctggacaggctcccagaggactgatcggcggcacaaacaaaagagccccttggacacccgccagattcagcggatcactgctcggaggaaaggccgctctgacactgtctggtgtccagcctgaggacgaggccgagtattattgcgccctgtggtacagcaaccacctggtgtttggcggaggcaccaagctgacagttcttggcggaggcggaagtggaggcggaggatctggcggcggaggctctgaagttcagctggttgaatcaggcggtggcctggttcaacctggcggatctctgagactgagctgtgccgccagcggctttagcctgagcagaaattctgtgcactgggtccgacaggcccctggcaaaggacttgagtgggtcggaatgatctggggaggcggcagcaccgattacaacagcgccctgaagtcccggttcaccatcagcagagacaacagcaagaacaccctgtacctccagatgaacagcctgagagccgaggacaccgccgtgtactactgtgccagaaacggcggctacgacgtgttccactattggggccagggaaccaccgtgaccgttagctctacgcgtgagcagaaactgatctcggaagaggatctggcgaagcccaccacgacgccagcgccgcgaccaccaacaccggcgcccaccatcgcgtcgcagcccctgtccctgcgcccagaggcgtgccggccagcggcggggggcgcagtgcacacgagggggctggacttcgcctgtgacatctacatctgggcgcccttggccgggacttgtggggtccttctcctgtcactggttatcaccctttactgcgggcgcgccagagtgaagttcagcaggagcgcagacgcccccgcgtaccagcagggccagaaccagctctataacgagctgaatctaggacgaagagaggagtacgatgttttggacaagagacgtggccgggaccctgagatggggggaaagccgagaaggaagaaccctcaggaaggcctgtacaatgaactgcagaaagataagatggcggaggcctacagtgagattgggatgaaaggcgagcgccggaggggcaaggggcacgatggcctttaccagggtctcagtacagccaccaaggacacctacgacgcccttcacatgcaggccctgccccctcgctctagaggatctggagcaacaaacttctcactactcaaacaagcaggtgacgtggaggagaatcccgggcctgggatccacatggccacttacgaggttctctgtgaggtggcgcggaaactgggcacggatgacagggaagtggtattgttcctcctaaacgtgttcatacctcaacccacactggcccaattaattggagctcttagagctttaaaggaggagggcaggttaacgtttcccctgttagcggaatgtctgtttcgtgcaggtcgcagagacctcttgcgcgacctgcttcacttagacccgcgttttttagagcgccacctagcgggcacaatgagttatttcagcccttatcagctcactgttctccacgtagacggggagctgtgtgcgagggatattaggtctttgatatttttaagcaaggacactatagggtctcgcagcacaccacagacattcttacactgggtgtactgtatggaaaacttagacctactgggtcccactgacgtggatgccctaatgtcaatgcttagatctttgtcaagagtagacctacagcgccaagtgcaaaccctaatgggccttcacctttccggcccatcacactcccaacactatcgccatacaccactcgagaccgatttctacgactacaaggacgacgatgacaagactagtggctccggcgagggcagaggaagtctactaacctgcggagatgtggaagaaaatcctggcccacatatgaccgagtacaagcccacggtgcgcctcgccacccgcgacgacgtccccagggccgtacgcaccctcgccgccgcgttcgccgactaccccgccacgcgccacaccgtcgatccggaccgccacatcgagcgggtcaccgagctgcaagaactcttcctcacgcgcgtcgggctcgacatcggcaaggtgtgggtcgcggacgacggcgccgcggtggcggtctggaccacgccggagagcgtcgaagcgggggcggtgttcgccgagatcggcccgcgcatggccgagttgagcggttcccggctggccgcgcagcaacagatggaaggcctcctggcgccgcaccggcccaaggagcccgcgtggttcctggccaccgtcggcgtctcgcccgaccaccagggcaagggtctgggcagcgccgtcgtgctccccggagtggaggcggccgagcgcgccggggtgcccgccttcctggagacctccgcgccccgcaacctccccttctacgagcggctcggcttcaccgtcaccgccgacgtcgaggtgcccgaaggaccgcgcacctggtgcatgacccgcaagcccggtgcctga

SEQ ID NO: 7758 - DNA, 2562 bp, Artificial Sequence
  Synthetic Polynucleotide
atggccttaccagtgaccgccttgctcctgccgctggccttgctgctccacgccgccaggccgcaggccgtggttacacaagagcctagcctgacagtgtcccctggcggaacagtgaccctgacctgtagatcctctaccggcgctgtgaccaccagcaactatgccaactgggtgcagcagaagcctggacaggctcccagaggactgatcggcggcacaaacaaaagagccccttggacacccgccagattcagcggatcactgctcggaggaaaggccgctctgacactgtctggtgtccagcctgaggacgaggccgagtattattgcgccctgtggtacagcaaccacctggtgtttggcggaggcaccaagctgacagttcttctcgagatccagaaccctgatcctgccgtgtaccagctgcgggatagcaagagcagcgacaagagcgtgtgtctgttcaccgacttcgacagccagaccaacgtgtcccagagcaaggactccgacgtgtacatcaccgataagtgcgtgctggacatgcggagcatggacttcaagagcaactccgccgtggcctggtccaacaagtccgatttcgcctgcgccaacgccttcaacaacagcattatccccgaggacacattcttcccaagcagcgacgtgccctgcgacgtgaagctggtggaaaagagcttcgagacagacaccaacctgaacttccagaacctgagcgtgatcggcttcagaatcctgctgctgaaagtggccggctttaacctgctgatgaccctgcggctgtggtccagccgcgccaagagaagcggatctggcgtgaagcagaccctgaatttcgacctgctgaagctggctggcgacgtggaatccaacccaggccctactagtatggactggatttggcgcatccttttccttgtcggcgctgctaccggcgcgcattccttcgaagaagttcagctggttgaatcaggcggtggcctggttcaacctggcggatctctgagactgagctgtgccgccagcggctttagcctgagcagaaattctgtgcactgggtccgacaggcccctggcaaaggacttgagtgggtcggaatgatctggggaggcggcagcaccgattacaacagcgccctgaagtcccggttcaccatcagcagagacaacagcaagaacaccctgtacctccagatgaacagcctgagagccgaggacaccgccgtgtactactgtgccagaaacggcggctacgacgtgttccactattggggccagggaaccaccgtgaccgttagctctacgcgtgaggacctgaagaacgtgttcccacctgaggtggccgtgttcgagcctagcaaggccgagatcgcccacacccagaaagccaccctcgtgtgcctggctaccggcttctaccccgaccatgtggaactgtcttggtgggtcaacggcaaagaggtgcacagcggcgtgtgtaccgacccccagccactgaaagaacagcccgccctgaacgacagccggtactgcctgagcagcagactgagagtgtccgccaccttctggcagaacccccggaaccacttcagatgccaggtgcagttctacggcctgagcgagaacgacgagtggacccaggacagagccaagcccgtgacccagatcgtgtctgccgaagcctggggcagagccgattgcggcatcaccagcgccagctaccaccagggcgtgctgagcgccaccatcctgtacgagatcctgctgggcaaggccaccctgtacgccgtgctggtgtctgccctggtgctgatggctatggtcaagcggaaggacagccggggaagggccaagcgatctggatctggagcaacaaacttctcactactcaaacaagcaggtgacgtggaggagaatcccgggccttctagaggccatatgaccgagtacaagcccacggtgcgcctcgccacccgcgacgacgtccccagggccgtacgcaccctcgccgccgcgttcgccgactaccccgccacgcgccacaccgtcgatccggaccgccacatcgagcgggtcaccgagctgcaagaactcttcctcacgcgcgtcgggctcgacatcggcaaggtgtgggtcgcggacgacggcgccgcggtggcggtctggaccacgccggagagcgtcgaagcgggggcggtgttcgccgagatcggcccgcgcatggccgagttgagcggttcccggctggccgcgcagcaacagatggaaggcctcctggcgccgcaccggcccaaggagcccgcgtggttcctggccaccgtcggcgtctcgcccgaccaccagggcaagggtctgggcagcgccgtcgtgctccccggagtggaggcggccgagcgcgccggggtgcccgccttcctggagacctccgcgccccgcaacctccccttctacgagcggctcggcttcaccgtcaccgccgacgtcgaggtgcccgaaggaccgcgcacctggtgcatgacccgcaagcccggtgcctga

SEQ ID NO: 7759 - DNA, 2559 bp, Artificial Sequence
  Synthetic Polynucleotide
atggccttaccagtgaccgccttgctcctgccgctggccttgctgctccacgccgccaggccgcaggccgtggttacacaagagcctagcctgacagtgtcccctggcggaacagtgaccctgacctgtagatcctctaccggcgctgtgaccaccagcaactatgccaactgggtgcagcagaagcctggacaggctcccagaggactgatcggcggcacaaacaaaagagccccttggacacccgccagattcagcggatcactgctcggaggaaaggccgctctgacactgtctggtgtccagcctgaggacgaggccgagtattattgcgccctgtggtacagcaaccacctggtgtttggcggaggcaccaagctgacagttcttctcgaggacctgaagaacgtgttcccacctgaggtggccgtgttcgagcctagcaaggccgagatcgcccacacccagaaagccaccctcgtgtgcctggctaccggcttctaccccgaccatgtggaactgtcttggtgggtcaacggcaaagaggtgcacagcggcgtgtgtaccgacccccagccactgaaagaacagcccgccctgaacgacagccggtactgcctgagcagcagactgagagtgtccgccaccttctggcagaacccccggaaccacttcagatgccaggtgcagttctacggcctgagcgagaacgacgagtggacccaggacagagccaagcccgtgacccagatcgtgtctgccgaagcctggggcagagccgattgcggcatcaccagcgccagctaccaccagggcgtgctgagcgccaccatcctgtacgagatcctgctgggcaaggccaccctgtacgccgtgctggtgtctgccctggtgctgatggctatggtcaagcggaaggacagccggggaagggccaagcgatctggatctggagcaacaaacttctcactactcaaacaagcaggtgacgtggaggagaatcccgggcctactagtatggactggatttggcgcatccttttccttgtcggcgctgctaccggcgcgcattccttcgaagaagttcagctggttgaatcaggcggtggcctggttcaacctggcggatctctgagactgagctgtgccgccagcggctttagcctgagcagaaattctgtgcactgggtccgacaggcccctggcaaaggacttgagtgggtcggaatgatctggggaggcggcagcaccgattacaacagcgccctgaagtcccggttcaccatcagcagagacaacagcaagaacaccctgtacctccagatgaacagcctgagagccgaggacaccgccgtgtactactgtgccagaaacggcggctacgacgtgttccactattggggccagggaaccaccgtgaccgttagctctacgcgtatccagaaccctgatcctgccgtgtaccagctgcgggatagcaagagcagcgacaagagcgtgtgtctgttcaccgacttcgacagccagaccaacgtgtcccagagcaaggactccgacgtgtacatcaccgataagtgcgtgctggacatgcggagcatggacttcaagagcaactccgccgtggcctggtccaacaagtccgatttcgcctgcgccaacgccttcaacaacagcattatccccgaggacacattcttcccaagcagcgacgtgccctgcgacgtgaagctggtggaaaagagcttcgagacagacaccaacctgaacttccagaacctgagcgtgatcggcttcagaatcctgctgctgaaagtggccggctttaacctgctgatgaccctgcggctgtggtccagccgcgccaagagaagcggatctggcgtgaagcagaccctgaatttcgacctgctgaagctggctggcgacgtggaatccaacccaggcccttctagaggccatatgaccgagtacaagcccacggtgcgcctcgccacccgcgacgacgtccccagggccgtacgcaccctcgccgccgcgttcgccgactaccccgccacgcgccacaccgtcgatccggaccgccacatcgagcgggtcaccgagctgcaagaactcttcctcacgcgcgtcgggctcgacatcggcaaggtgtgggtcgcggacgacggcgccgcggtggcggtctggaccacgccggagagcgtcgaagcgggggcggtgttcgccgagatcggcccgcgcatggccgagttgagcggttcccggctggccgcgcagcaacagatggaaggcctcctggcgccgcaccggcccaaggagcccgcgtggttcctggccaccgtcggcgtctcgcccgaccaccagggcaagggtctgggcagcgccgtcgtgctccccggagtggaggcggccgagcgcgccggggtgcccgccttcctggagacctccgcgccccgcaacctccccttctacgagcggctcggcttcaccgtcaccgccgacgtcgaggtgcccgaaggaccgcgcacctggtgcatgacccgcaagcccggtgcctga

SEQ ID NO: 7760 - DNA, 1857 bp, Artificial Sequence
  Synthetic Polynucleotide
atggccttaccagtgaccgccttgctcctgccgctggccttgctgctccacgccgccaggccgcaggccgtggttacacaagagcctagcctgacagtgtcccctggcggaacagtgaccctgacctgtagatcctctaccggcgctgtgaccaccagcaactatgccaactgggtgcagcagaagcctggacaggctcccagaggactgatcggcggcacaaacaaaagagccccttggacacccgccagattcagcggatcactgctcggaggaaaggccgctctgacactgtctggtgtccagcctgaggacgaggccgagtattattgcgccctgtggtacagcaaccacctggtgtttggcggaggcaccaagctgacagttcttctcgaggacctgaagaacgtgttcccacctgaggtggccgtgttcgagcctagcgaggccgagatcagccacacccagaaagccaccctcgtgtgcctggctaccggcttctaccccgaccatgtggaactgtcttggtgggtcaacggcaaagaggtgcacagcggcgtgtgtaccgacccccagccactgaaagaacagcccgccctgaacgacagccggtactgcctgagcagcagactgagagtgtccgccaccttctggcagaacccccggaaccacttcagatgccaggtgcagttctacggcctgagcgagaacgacgagtggacccaggacagagccaagcccgtgacccagatcgtgtctgccgaagcctggggcagagccgattgcggctttaccagcgagagctaccagcagggcgtgctgagcgccaccatcctgtacgagatcctgctgggcaaggccaccctgtacgccgtgctggtgtctgccctggtgctgatggctatggtcaagcggaaggacagccggggaagggccaagcgatctggatctggagcaacaaacttctcactactcaaacaagcaggtgacgtggaggagaatcccgggcctactagtatggactggatttggcgcatccttttccttgtcggcgctgctaccggcgcgcattccttcgaagaagttcagctggttgaatcaggcggtggcctggttcaacctggcggatctctgagactgagctgtgccgccagcggctttagcctgagcagaaattctgtgcactgggtccgacaggcccctggcaaaggacttgagtgggtcggaatgatctggggaggcggcagcaccgattacaacagcgccctgaagtcccggttcaccatcagcagagacaacagcaagaacaccctgtacctccagatgaacagcctgagagccgaggacaccgccgtgtactactgtgccagaaacggcggctacgacgtgttccactattggggccagggaaccaccgtgaccgttagctctacgcgtatccagaaccctgatcctgccgtgtaccagctgcgggatagcaagagcagcgacaagagcgtgtgtctgttcaccgacttcgacagccagaccaacgtgtcccagagcaaggactccgacgtgtacatcaccgataagtgcgtgctggacatgcggagcatggacttcaagagcaactccgccgtggcctggtccaacaagtccgatttcgcctgcgccaacgccttcaacaacagcattatccccgaggacacattcttcccaagccccgagagcagctgcgacgtgaagctggtggaaaagagcttcgagacagacaccaacctgaacttccagaacctgagcgtgatcggcttcagaatcctgctgctgaaagtggccggctttaacctgctgatgaccctgcggctgtggtccagc

SEQ ID NO: 7761 - DNA, 2532 bp, Artificial Sequence
  Synthetic Polynucleotide
atggccttaccagtgaccgccttgctcctgccgctggccttgctgctccacgccgccaggccgcaggccgtggttacacaagagcctagcctgacagtgtcccctggcggaacagtgaccctgacctgtagatcctctaccggcgctgtgaccaccagcaactatgccaactgggtgcagcagaagcctggacaggctcccagaggactgatcggcggcacaaacaaaagagccccttggacacccgccagattcagcggatcactgctcggaggaaaggccgctctgacactgtctggtgtccagcctgaggacgaggccgagtattattgcgccctgtggtacagcaaccacctggtgtttggcggaggcaccaagctgacagttcttctcgaggacctgaagaacgtgttcccacctgaggtggccgtgttcgagcctagcgaggccgagatcagccacacccagaaagccaccctcgtgtgcctggctaccggcttctaccccgaccatgtggaactgtcttggtgggtcaacggcaaagaggtgcacagcggcgtgtgtaccgacccccagccactgaaagaacagcccgccctgaacgacagccggtactgcctgagcagcagactgagagtgtccgccaccttctggcagaacccccggaaccacttcagatgccaggtgcagttctacggcctgagcgagaacgacgagtggacccaggacagagccaagcccgtgacccagatcgtgtctgccgaagcctggggcagagccgattgcggctttaccagcgagagctaccagcagggcgtgctgagcgccaccatcctgtacgagatcctgctgggcaaggccaccctgtacgccgtgctggtgtctgccctggtgctgatggctatggtcaagcggaaggacagccggggaagggccaagcgatctggatctggagcaacaaacttctcactactcaaacaagcaggtgacgtggaggagaatcccgggcctactagtatggactggatttggcgcatccttttccttgtcggcgctgctaccggcgcgcattccttcgaagaagttcagctggttgaatcaggcggtggcctggttcaacctggcggatctctgagactgagctgtgccgccagcggctttagcctgagcagaaattctgtgcactgggtccgacaggcccctggcaaaggacttgagtgggtcggaatgatctggggaggcggcagcaccgattacaacagcgccctgaagtcccggttcaccatcagcagagacaacagcaagaacaccctgtacctccagatgaacagcctgagagccgaggacaccgccgtgtactactgtgccagaaacggcggctacgacgtgttccactattggggccagggaaccaccgtgaccgttagctctacgcgtatccagaaccctgatcctgccgtgtaccagctgcgggatagcaagagcagcgacaagagcgtgtgtctgttcaccgacttcgacagccagaccaacgtgtcccagagcaaggactccgacgtgtacatcaccgataagtgcgtgctggacatgcggagcatggacttcaagagcaactccgccgtggcctggtccaacaagtccgatttcgcctgcgccaacgccttcaacaacagcattatccccgaggacacattcttcccaagccccgagagcagctgcgacgtgaagctggtggaaaagagcttcgagacagacaccaacctgaacttccagaacctgagcgtgatcggcttcagaatcctgctgctgaaagtggccggctttaacctgctgatgaccctgcggctgtggtccagccgcgccaagagaagcggatctggcgtgaagcagaccctgaatttcgacctgctgaagctggctggcgacgtggaatccaacccaggcccttctagaggcgggatccacaccatggctacctacgaggtgctgtgcgaggtggcaagaaagctgggcaccgacgacagagaagtggtgctgttcctgctgaacgtgttcatccctcagcctacactggcccagctgatcggtgcactgagagccctgaaagaggaaggccggctgacctttcctctgctggccgaatgcctgttcagagccggaagaagggatctgctgcgggacctgctgcatctggaccccagatttctggaaagacacctggccggcaccatgagctacttcagcccttaccagctgaccgtgctgcacgttgacggcgaactgtgcgccagagatattcggagcctgatcttcctgagcaaggacaccatcggcagccggtctacccctcagacatttctgcactgggtgtactgcatggaaaacctggacctgctcggccccacagatgtggatgccctgatgtccatgctgagaagcctgagcagagtggacctccagagacaggtgcagacactgatgggactgcacctgagcggacctagccacagccagcactacagacacacccct

SEQ ID NO: 7762 - DNA, 1869 bp, Artificial Sequence
  Synthetic Polynucleotide
atggccttaccagtgaccgccttgctcctgccgctggccttgctgctccacgccgccaggccgcaggccgtggttacacaagagcctagcctgacagtgtcccctggcggaacagtgaccctgacctgtagatcctctaccggcgctgtgaccaccagcaactatgccaactgggtgcagcagaagcctggacaggctcccagaggactgatcggcggcacaaacaaaagagccccttggacacccgccagattcagcggatcactgctcggaggaaaggccgctctgacactgtctggtgtccagcctgaggacgaggccgagtattattgcgccctgtggtacagcaaccacctggtgtttggcggaggcaccaagctgacagttcttctcgagatccagaaccctgatcctgccgtgtaccagctgcgggatagcaagagcagcgacaagagcgtgtgtctgttcaccgacttcgacagccagaccaacgtgtcccagagcaaggactccgacgtgtacatcaccgataagtgcgtgctggacatgcggagcatggacttcaagagcaactccgccgtggcctggtccaacaagtccgatttcgcctgcgccaacgccttcaacaacagcattatccccgaggacacattcttcccaagccccgagagcagctgcgacgtgaagctggtggaaaagagcttcgagacagacaccaacctgaacttccagaacctgagcgtgatcggcttcagaatcctgctgctgaaagtggccggctttaacctgctgatgaccctgcggctgtggtccagccgcgccaagagaagcggatctggcgtgaagcagaccctgaatttcgacctgctgaagctggctggcgacgtggaatccaacccaggccctactagtatggactggatttggcgcatccttttccttgtcggcgctgctaccggcgcgcattccttcgaagaagttcagctggttgaatcaggcggtggcctggttcaacctggcggatctctgagactgagctgtgccgccagcggctttagcctgagcagaaattctgtgcactgggtccgacaggcccctggcaaaggacttgagtgggtcggaatgatctggggaggcggcagcaccgattacaacagcgccctgaagtcccggttcaccatcagcagagacaacagcaagaacaccctgtacctccagatgaacagcctgagagccgaggacaccgccgtgtactactgtgccagaaacggcggctacgacgtgttccactattggggccagggaaccaccgtgaccgttagctctacgcgtgaggacctgaagaacgtgttcccacctgaggtggccgtgttcgagcctagcgaggccgagatcagccacacccagaaagccaccctcgtgtgcctggctaccggcttctaccccgaccatgtggaactgtcttggtgggtcaacggcaaagaggtgcacagcggcgtgtgtaccgacccccagccactgaaagaacagcccgccctgaacgacagccggtactgcctgagcagcagactgagagtgtccgccaccttctggcagaacccccggaaccacttcagatgccaggtgcagttctacggcctgagcgagaacgacgagtggacccaggacagagccaagcccgtgacccagatcgtgtctgccgaagcctggggcagagccgattgcggctttaccagcgagagctaccagcagggcgtgctgagcgccaccatcctgtacgagatcctgctgggcaaggccaccctgtacgccgtgctggtgtctgccctggtgctgatggctatggtcaagcggaaggacagccgggga

SEQ ID NO: 7763 - DNA, 2535 bp, Artificial Sequence
  Synthetic Polynucleotide
atggccttaccagtgaccgccttgctcctgccgctggccttgctgctccacgccgccaggccgcaggccgtggttacacaagagcctagcctgacagtgtcccctggcggaacagtgaccctgacctgtagatcctctaccggcgctgtgaccaccagcaactatgccaactgggtgcagcagaagcctggacaggctcccagaggactgatcggcggcacaaacaaaagagccccttggacacccgccagattcagcggatcactgctcggaggaaaggccgctctgacactgtctggtgtccagcctgaggacgaggccgagtattattgcgccctgtggtacagcaaccacctggtgtttggcggaggcaccaagctgacagttcttctcgagatccagaaccctgatcctgccgtgtaccagctgcgggatagcaagagcagcgacaagagcgtgtgtctgttcaccgacttcgacagccagaccaacgtgtcccagagcaaggactccgacgtgtacatcaccgataagtgcgtgctggacatgcggagcatggacttcaagagcaactccgccgtggcctggtccaacaagtccgatttcgcctgcgccaacgccttcaacaacagcattatccccgaggacacattcttcccaagccccgagagcagctgcgacgtgaagctggtggaaaagagcttcgagacagacaccaacctgaacttccagaacctgagcgtgatcggcttcagaatcctgctgctgaaagtggccggctttaacctgctgatgaccctgcggctgtggtccagccgcgccaagagaagcggatctggcgtgaagcagaccctgaatttcgacctgctgaagctggctggcgacgtggaatccaacccaggccctactagtatggactggatttggcgcatccttttccttgtcggcgctgctaccggcgcgcattccttcgaagaagttcagctggttgaatcaggcggtggcctggttcaacctggcggatctctgagactgagctgtgccgccagcggctttagcctgagcagaaattctgtgcactgggtccgacaggcccctggcaaaggacttgagtgggtcggaatgatctggggaggcggcagcaccgattacaacagcgccctgaagtcccggttcaccatcagcagagacaacagcaagaacaccctgtacctccagatgaacagcctgagagccgaggacaccgccgtgtactactgtgccagaaacggcggctacgacgtgttccactattggggccagggaaccaccgtgaccgttagctctacgcgtgaggacctgaagaacgtgttcccacctgaggtggccgtgttcgagcctagcgaggccgagatcagccacacccagaaagccaccctcgtgtgcctggctaccggcttctaccccgaccatgtggaactgtcttggtgggtcaacggcaaagaggtgcacagcggcgtgtgtaccgacccccagccactgaaagaacagcccgccctgaacgacagccggtactgcctgagcagcagactgagagtgtccgccaccttctggcagaacccccggaaccacttcagatgccaggtgcagttctacggcctgagcgagaacgacgagtggacccaggacagagccaagcccgtgacccagatcgtgtctgccgaagcctggggcagagccgattgcggctttaccagcgagagctaccagcagggcgtgctgagcgccaccatcctgtacgagatcctgctgggcaaggccaccctgtacgccgtgctggtgtctgccctggtgctgatggctatggtcaagcggaaggacagccggggaagggccaagcgatctggatctggagcaacaaacttctcactactcaaacaagcaggtgacgtggaggagaatcccgggccttctagaggcgggatccacaccatggctacctacgaggtgctgtgcgaggtggcaagaaagctgggcaccgacgacagagaagtggtgctgttcctgctgaacgtgttcatccctcagcctacactggcccagctgatcggtgcactgagagccctgaaagaggaaggccggctgacctttcctctgctggccgaatgcctgttcagagccggaagaagggatctgctgcgggacctgctgcatctggaccccagatttctggaaagacacctggccggcaccatgagctacttcagcccttaccagctgaccgtgctgcacgttgacggcgaactgtgcgccagagatattcggagcctgatcttcctgagcaaggacaccatcggcagccggtctacccctcagacatttctgcactgggtgtactgcatggaaaacctggacctgctcggccccacagatgtggatgccctgatgtccatgctgagaagcctgagcagagtggacctccagagacaggtgcagacactgatgggactgcacctgagcggacctagccacagccagcactacagacacacccct

SEQ ID NO: 7764 - DNA, 2694 bp, Artificial Sequence
  Synthetic Polynucleotide
atggccttaccagtgaccgccttgctcctgccgctggccttgctgctccacgccgccaggccgctcgaggggaaaccaattcccaaccctcttctgggactggattcaaccggcagcggcgaggacctgaagaacgtgttcccacctgaggtggccgtgttcgagcctagcaaggccgagatcgcccacacccagaaagccaccctcgtgtgcctggctaccggcttctaccccgaccatgtggaactgtcttggtgggtcaacggcaaagaggtgcacagcggcgtgtgtaccgacccccagccactgaaagaacagcccgccctgaacgacagccggtactgcctgagcagcagactgagagtgtccgccaccttctggcagaacccccggaaccacttcagatgccaggtgcagttctacggcctgagcgagaacgacgagtggacccaggacagagccaagcccgtgacccagatcgtgtctgccgaagcctggggcagagccgattgcggcatcaccagcgccagctaccaccagggcgtgctgagcgccaccatcctgtacgagatcctgctgggcaaggccaccctgtacgccgtgctggtgtctgccctggtgctgatggctatggtcaagcggaaggacagccggggaagggccaagcgatctggatctggagcaacaaacttctcactactcaaacaagcaggtgacgtggaggagaatcccgggcctactagcatggccttaccagtgaccgccttgctcctgccgctggccttgctgctccacgccgccaggccgcaggccgtggttacacaagagcctagcctgacagtgtcccctggcggaacagtgaccctgacctgtagatcctctaccggcgctgtgaccaccagcaactatgccaactgggtgcagcagaagcctggacaggctcccagaggactgatcggcggcacaaacaaaagagccccttggacacccgccagattcagcggatcactgctcggaggaaaggccgctctgacactgtctggtgtccagcctgaggacgaggccgagtattattgcgccctgtggtacagcaaccacctggtgtttggcggaggcaccaagctgacagttcttggcggaggcggaagtggaggcggaggatctggcggcggaggctctgaagttcagctggttgaatcaggcggtggcctggttcaacctggcggatctctgagactgagctgtgccgccagcggctttagcctgagcagaaattctgtgcactgggtccgacaggcccctggcaaaggacttgagtgggtcggaatgatctggggaggcggcagcaccgattacaacagcgccctgaagtcccggttcaccatcagcagagacaacagcaagaacaccctgtacctccagatgaacagcctgagagccgaggacaccgccgtgtactactgtgccagaaacggcggctacgacgtgttccactattggggccagggaaccaccgtgaccgttagctctacgcgtgagcagaaactgatctcggaagaggatgggagcggcatccagaaccctgatcctgccgtgtaccagctgcgggatagcaagagcagcgacaagagcgtgtgtctgttcaccgacttcgacagccagaccaacgtgtcccagagcaaggactccgacgtgtacatcaccgataagtgcgtgctggacatgcggagcatggacttcaagagcaactccgccgtggcctggtccaacaagtccgatttcgcctgcgccaacgccttcaacaacagcattatccccgaggacacattcttcccaagcagcgacgtgccctgcgacgtgaagctggtggaaaagagcttcgagacagacaccaacctgaacttccagaacctgagcgtgatcggcttcagaatcctgctgctgaaagtggccggctttaacctgctgatgaccctgcggctgtggtccagccgcgccaagagaagcggatctggcgtgaagcagaccctgaatttcgacctgctgaagctggctggcgacgtggaatccaacccaggcccttctagaggccatatgaccgagtacaagcccacggtgcgcctcgccacccgcgacgacgtccccagggccgtacgcaccctcgccgccgcgttcgccgactaccccgccacgcgccacaccgtcgatccggaccgccacatcgagcgggtcaccgagctgcaagaactcttcctcacgcgcgtcgggctcgacatcggcaaggtgtgggtcgcggacgacggcgccgcggtggcggtctggaccacgccggagagcgtcgaagcgggggcggtgttcgccgagatcggcccgcgcatggccgagttgagcggttcccggctggccgcgcagcaacagatggaaggcctcctggcgccgcaccggcccaaggagcccgcgtggttcctggccaccgtcggcgtctcgcccgaccaccagggcaagggtctgggcagcgccgtcgtgctccccggagtggaggcggccgagcgcgccggggtgcccgccttcctggagacctccgcgccccgcaacctccccttctacgagcggctcggcttcaccgtcaccgccgacgtcgaggtgcccgaaggaccgcgcacctggtgcatgacccgcaagcccggtgcctga

SEQ ID NO: 7765 - DNA, 2697 bp, Artificial Sequence
  Synthetic Polynucleotide
atggccttaccagtgaccgccttgctcctgccgctggccttgctgctccacgccgccaggccgctcgagcagaaactgatctcggaagaggatctgggctccggcgatcgccctgatcctgccgtgtaccagctgcgggatagcaagagcagcgacaagagcgtgtgtctgttcaccgacttcgacagccagaccaacgtgtcccagagcaaggactccgacgtgtacatcaccgataagtgcgtgctggacatgcggagcatggacttcaagagcaactccgccgtggcctggtccaacaagtccgatttcgcctgcgccaacgccttcaacaacagcattatccccgaggacacattcttcccaagccccgagagcagctgcgacgtgaagctggtggaaaagagcttcgagacagacaccaacctgaacttccagaacctgagcgtgatcggcttcagaatcctgctgctgaaagtggccggctttaacctgctgatgaccctgcggctgtggtccagctctagtcgcgccaagagaagcggatctggcgtgaagcagaccctgaatttcgacctgctgaagctggctggcgacgtggaatccaacccaggccccactagcatggccttaccagtgaccgccttgctcctgccgctggccttgctgctccacgccgccaggccgcaggccgtggttacacaagagcctagcctgacagtgtcccctggcggaacagtgaccctgacctgtagatcctctaccggcgctgtgaccaccagcaactatgccaactgggtgcagcagaagcctggacaggctcccagaggactgatcggcggcacaaacaaaagagccccttggacacccgccagattcagcggatcactgctcggaggaaaggccgctctgacactgtctggtgtccagcctgaggacgaggccgagtattattgcgccctgtggtacagcaaccacctggtgtttggcggaggcaccaagctgacagttcttggcggaggcggaagtggaggcggaggatctggcggcggaggctctgaagttcagctggttgaatcaggcggtggcctggttcaacctggcggatctctgagactgagctgtgccgccagcggctttagcctgagcagaaattctgtgcactgggtccgacaggcccctggcaaaggacttgagtgggtcggaatgatctggggaggcggcagcaccgattacaacagcgccctgaagtcccggttcaccatcagcagagacaacagcaagaacaccctgtacctccagatgaacagcctgagagccgaggacaccgccgtgtactactgtgccagaaacggcggctacgacgtgttccactattggggccagggaaccaccgtgaccgttagctctacgcgtgggaaaccaattcccaaccctcttctgggactggattcaaccggcagcggcgaggacctgaagaacgtgttcccacctgaggtggccgtgttcgagcctagcgaggccgagatcagccacacccagaaagccaccctcgtgtgcctggctaccggcttctaccccgaccatgtggaactgtcttggtgggtcaacggcaaagaggtgcacagcggcgtgtgtaccgacccccagccactgaaagaacagcccgccctgaacgacagccggtactgcctgagcagcagactgagagtgtccgccaccttctggcagaacccccggaaccacttcagatgccaggtgcagttctacggcctgagcgagaacgacgagtggacccaggacagagccaagcccgtgacccagatcgtgtctgccgaagcctggggcagagccgattgcggctttaccagcgagagctaccagcagggcgtgctgagcgccaccatcctgtacgagatcctgctgggcaaggccaccctgtacgccgtgctggtgtctgccctggtgctgatggctatggtcaagcggaaggacagccggggaagggccaagcgatctggatctggagcaacaaacttctcactactcaaacaagcaggtgacgtggaggagaatcccgggccttctagaggccatatgaccgagtacaagcccacggtgcgcctcgccacccgcgacgacgtccccagggccgtacgcaccctcgccgccgcgttcgccgactaccccgccacgcgccacaccgtcgatccggaccgccacatcgagcgggtcaccgagctgcaagaactcttcctcacgcgcgtcgggctcgacatcggcaaggtgtgggtcgcggacgacggcgccgcggtggcggtctggaccacgccggagagcgtcgaagcgggggcggtgttcgccgagatcggcccgcgcatggccgagttgagcggttcccggctggccgcgcagcaacagatggaaggcctcctggcgccgcaccggcccaaggagcccgcgtggttcctggccaccgtcggcgtctcgcccgaccaccagggcaagggtctgggcagcgccgtcgtgctccccggagtggaggcggccgagcgcgccggggtgcccgccttcctggagacctccgcgccccgcaacctccccttctacgagcggctcggcttcaccgtcaccgccgacgtcgaggtgcccgaaggaccgcgcacctggtgcatgacccgcaagcccggtgcctga

SEQ ID NO: 7766 - DNA, 2559 bp, Artificial Sequence
  Synthetic Polynucleotide
atggccttaccagtgaccgccttgctcctgccgctggccttgctgctccacgccgccaggccgcaggccgtggttacacaagagcctagcctgacagtgtcccctggcggaacagtgaccctgacctgtagatcctctaccggcgctgtgaccaccagcaactatgccaactgggtgcagcagaagcctggacaggctcccagaggactgatcggcggcacaaacaaaagagccccttggacacccgccagattcagcggatcactgctcggaggaaaggccgctctgacactgtctggtgtccagcctgaggacgaggccgagtattattgcgccctgtggtacagcaaccacctggtgtttggcggaggcaccaagctgacagttcttctcgaggacctgaagaacgtgttcccacctgaggtggccgtgttcgagcctagcgaggccgagatcagccacacccagaaagccaccctcgtgtgcctggctaccggcttctaccccgaccatgtggaactgtcttggtgggtcaacggcaaagaggtgcacagcggcgtgtctaccgacccccagccactgaaagaacagcccgccctgaacgacagccggtactgcctgagcagcagactgagagtgtccgccaccttctggcagaacccccggaaccacttcagatgccaggtgcagttctacggcctgagcgagaacgacgagtggacccaggacagagccaagcccgtgacccagatcgtgtctgccgaagcctggggcagagccgattgcggctttaccagcgagagctaccagcagggcgtgctgagcgccaccatcctgtacgagatcctgctgggcaaggccaccctgtacgccgtgctggtgtctgccctggtgctgatggctatggtcaagcggaaggacagccggggaagggccaagcgatctggatctggagcaacaaacttctcactactcaaacaagcaggtgacgtggaggagaatcccgggcctactagtatggactggatttggcgcatccttttccttgtcggcgctgctaccggcgcgcattccttcgaagaagttcagctggttgaatcaggcggtggcctggttcaacctggcggatctctgagactgagctgtgccgccagcggctttagcctgagcagaaattctgtgcactgggtccgacaggcccctggcaaaggacttgagtgggtcggaatgatctggggaggcggcagcaccgattacaacagcgccctgaagtcccggttcaccatcagcagagacaacagcaagaacaccctgtacctccagatgaacagcctgagagccgaggacaccgccgtgtactactgtgccagaaacggcggctacgacgtgttccactattggggccagggaaccaccgtgaccgttagctctacgcgtatccagaaccctgatcctgccgtgtaccagctgcgggatagcaagagcagcgacaagagcgtgtgtctgttcaccgacttcgacagccagaccaacgtgtcccagagcaaggactccgacgtgtacatcaccgataagaccgtgctggacatgcggagcatggacttcaagagcaactccgccgtggcctggtccaacaagtccgatttcgcctgcgccaacgccttcaacaacagcattatccccgaggacacattcttcccaagccccgagagcagctgcgacgtgaagctggtggaaaagagcttcgagacagacaccaacctgaacttccagaacctgagcgtgatcggcttcagaatcctgctgctgaaagtggccggctttaacctgctgatgaccctgcggctgtggtccagccgcgccaagagaagcggatctggcgtgaagcagaccctgaatttcgacctgctgaagctggctggcgacgtggaatccaacccaggcccttctagaggccatatgaccgagtacaagcccacggtgcgcctcgccacccgcgacgacgtccccagggccgtacgcaccctcgccgccgcgttcgccgactaccccgccacgcgccacaccgtcgatccggaccgccacatcgagcgggtcaccgagctgcaagaactcttcctcacgcgcgtcgggctcgacatcggcaaggtgtgggtcgcggacgacggcgccgcggtggcggtctggaccacgccggagagcgtcgaagcgggggcggtgttcgccgagatcggcccgcgcatggccgagttgagcggttcccggctggccgcgcagcaacagatggaaggcctcctggcgccgcaccggcccaaggagcccgcgtggttcctggccaccgtcggcgtctcgcccgaccaccagggcaagggtctgggcagcgccgtcgtgctccccggagtggaggcggccgagcgcgccggggtgcccgccttcctggagacctccgcgccccgcaacctccccttctacgagcggctcggcttcaccgtcaccgccgacgtcgaggtgcccgaaggaccgcgcacctggtgcatgacccgcaagcccggtgcctga

SEQ ID NO: 7767 - DNA, 2805 bp, Artificial Sequence
  Synthetic Polynucleotide
atggccttaccagtgaccgccttgctcctgccgctggccttgctgctccacgccgccaggccgcaggccgtggttacacaagagcctagcctgacagtgtcccctggcggaacagtgaccctgacctgtagatcctctaccggcgctgtgaccaccagcaactatgccaactgggtgcagcagaagcctggacaggctcccagaggactgatcggcggcacaaacaaaagagccccttggacacccgccagattcagcggatcactgctcggaggaaaggccgctctgacactgtctggtgtccagcctgaggacgaggccgagtattattgcgccctgtggtacagcaaccacctggtgtttggcggaggcaccaagctgacagttcttctcgaggacctgaagaacgtgttcccacctgaggtggccgtgttcgagcctagcgaggccgagatcagccacacccagaaagccaccctcgtgtgcctggctaccggcttctaccccgaccatgtggaactgtcttggtgggtcaacggcaaagaggtgcacagcggcgtgtctaccgacccccagccactgaaagaacagcccgccctgaacgacagccggtactgcctgagcagcagactgagagtgtccgccaccttctggcagaacccccggaaccacttcagatgccaggtgcagttctacggcctgagcgagaacgacgagtggacccaggacagagccaagcccgtgacccagatcgtgtctgccgaagcctggggcagagccgattgcggctttaccagcgagagctaccagcagggcgtgctgagcgccaccatcctgtacgagatcctgctgggcaaggccaccctgtacgccgtgctggtgtctgccctggtgctgatggctatggtcaagcggaaggacagccggggaagggccaagcgatctggatctggagcaacaaacttctcactactcaaacaagcaggtgacgtggaggagaatcccgggcctactagtatggactggatttggcgcatccttttccttgtcggcgctgctaccggcgcgcattccttcgaagaagttcagctggttgaatcaggcggtggcctggttcaacctggcggatctctgagactgagctgtgccgccagcggctttagcctgagcagaaattctgtgcactgggtccgacaggcccctggcaaaggacttgagtgggtcggaatgatctggggaggcggcagcaccgattacaacagcgccctgaagtcccggttcaccatcagcagagacaacagcaagaacaccctgtacctccagatgaacagcctgagagccgaggacaccgccgtgtactactgtgccagaaacggcggctacgacgtgttccactattggggccagggaaccaccgtgaccgttagctctacgcgtgagcagaaactgatctcggaagaggatgggagcggcaccccattcccttctctggcccctcccatcatgctgctggtggacggcaagcagcagatggtggtcgtgtgcctggtgctggatgtggccccacctggactggacagccccatctggtttagcgccggcaatggctctgccctggacgcctttacctacggcccaagccctgccaccgatggcacctggacaaatctggcccacctgagcctgcccagcgaggaactggcttcttgggagcctctcgtgtgccacacaggacctggcgctgagggacacagcagatccacccagcctatgcacctgtctggcgaggccagcaccgccagaacctgtcctcaggaacctctgagaggcacccctggcggagcactgtggctgggagtgctgagactgctgctgttcaagctgctgctgtttgacctgctgctgacctgctcctgtctgtgcgatcctgccggccctctgccttctcctgccaccaccacaagactgagagccctgggcagccacagactgcaccctgccacagagacaggcggcagagaggccacaagcagccctagaccccagcccagagacagaagatggggcgataccccccctggcagaaagcctggatctccagtccgcgccaagagaagcggatctggcgtgaagcagaccctgaatttcgacctgctgaagctggctggcgacgtggaatccaacccaggcccttctagaggccatatgaccgagtacaagcccacggtgcgcctcgccacccgcgacgacgtccccagggccgtacgcaccctcgccgccgcgttcgccgactaccccgccacgcgccacaccgtcgatccggaccgccacatcgagcgggtcaccgagctgcaagaactcttcctcacgcgcgtcgggctcgacatcggcaaggtgtgggtcgcggacgacggcgccgcggtggcggtctggaccacgccggagagcgtcgaagcgggggcggtgttcgccgagatcggcccgcgcatggccgagttgagcggttcccggctggccgcgcagcaacagatggaaggcctcctggcgccgcaccggcccaaggagcccgcgtggttcctggccaccgtcggcgtctcgcccgaccaccagggcaagggtctgggcagcgccgtcgtgctccccggagtggaggcggccgagcgcgccggggtgcccgccttcctggagacctccgcgccccgcaacctccccttctacgagcggctcggcttcaccgtcaccgccgacgtcgaggtgcccgaaggaccgcgcacctggtgcatgacccgcaagcccggtgcctga

SEQ ID NO: 7768 - DNA, 2859 bp, Artificial Sequence
  Synthetic Polynucleotide
atggccttaccagtgaccgccttgctcctgccgctggccttgctgctccacgccgccaggccgctcgaggacctgaagaacgtgttcccacctgaggtggccgtgttcgagcctagcgaggccgagatcagccacacccagaaagccaccctcgtgtgcctggctaccggcttctaccccgaccatgtggaactgtcttggtgggtcaacggcaaagaggtgcacagcggcgtgtctaccgacccccagccactgaaagaacagcccgccctgaacgacagccggtactgcctgagcagcagactgagagtgtccgccaccttctggcagaacccccggaaccacttcagatgccaggtgcagttctacggcctgagcgagaacgacgagtggacccaggacagagccaagcccgtgacccagatcgtgtctgccgaagcctggggcagagccgattgcggctttaccagcgagagctaccagcagggcgtgctgagcgccaccatcctgtacgagatcctgctgggcaaggccaccctgtacgccgtgctggtgtctgccctggtgctgatggctatggtcaagcggaaggacagccggggaagggccaagcgatctggatctggagcaacaaacttctcactactcaaacaagcaggtgacgtggaggagaatcccgggcctactagcatggccttaccagtgaccgccttgctcctgccgctggccttgctgctccacgccgccaggccgcaggccgtggttacacaagagcctagcctgacagtgtcccctggcggaacagtgaccctgacctgtagatcctctaccggcgctgtgaccaccagcaactatgccaactgggtgcagcagaagcctggacaggctcccagaggactgatcggcggcacaaacaaaagagccccttggacacccgccagattcagcggatcactgctcggaggaaaggccgctctgacactgtctggtgtccagcctgaggacgaggccgagtattattgcgccctgtggtacagcaaccacctggtgtttggcggaggcaccaagctgacagttcttggcggaggcggaagtggaggcggaggatctggcggcggaggctctgaagttcagctggttgaatcaggcggtggcctggttcaacctggcggatctctgagactgagctgtgccgccagcggctttagcctgagcagaaattctgtgcactgggtccgacaggcccctggcaaaggacttgagtgggtcggaatgatctggggaggcggcagcaccgattacaacagcgccctgaagtcccggttcaccatcagcagagacaacagcaagaacaccctgtacctccagatgaacagcctgagagccgaggacaccgccgtgtactactgtgccagaaacggcggctacgacgtgttccactattggggccagggaaccaccgtgaccgttagctctacgcgtgagcagaaactgatctcggaagaggatctggggagcggcaccccattcccttctctggcccctcccatcatgctgctggtggacggcaagcagcagatggtggtcgtgtgcctggtgctggatgtggccccacctggactggacagccccatctggtttagcgccggcaatggctctgccctggacgcctttacctacggcccaagccctgccaccgatggcacctggacaaatctggcccacctgagcctgcccagcgaggaactggcttcttgggagcctctcgtgtgccacacaggacctggcgctgagggacacagcagatccacccagcctatgcacctgtctggcgaggccagcaccgccagaacctgtcctcaggaacctctgagaggcacccctggcggagcactgtggctgggagtgctgagactgctgctgttcaagctgctgctgtttgacctgctgctgacctgctcctgtctgtgcgatcctgccggccctctgccttctcctgccaccaccacaagactgagagccctgggcagccacagactgcaccctgccacagagacaggcggcagagaggccacaagcagccctagaccccagcccagagacagaagatggggcgataccccccctggcagaaagcctggatctccagtccgcgccaagagaagcggatctggcgtgaagcagaccctgaatttcgacctgctgaagctggctggcgacgtggaatccaacccaggcccttctagatctagaggccatatgaccgagtacaagcccacggtgcgcctcgccacccgcgacgacgtccccagggccgtacgcaccctcgccgccgcgttcgccgactaccccgccacgcgccacaccgtcgatccggaccgccacatcgagcgggtcaccgagctgcaagaactcttcctcacgcgcgtcgggctcgacatcggcaaggtgtgggtcgcggacgacggcgccgcggtggcggtctggaccacgccggagagcgtcgaagcgggggcggtgttcgccgagatcggcccgcgcatggccgagttgagcggttcccggctggccgcgcagcaacagatggaaggcctcctggcgccgcaccggcccaaggagcccgcgtggttcctggccaccgtcggcgtctcgcccgaccaccagggcaagggtctgggcagcgccgtcgtgctccccggagtggaggcggccgagcgcgccggggtgcccgccttcctggagacctccgcgccccgcaacctccccttctacgagcggctcggcttcaccgtcaccgccgacgtcgaggtgcccgaaggaccgcgcacctggtgcatgacccgcaagcccggtgcctga

SEQ ID NO: 7769 - DNA, 2670 bp, Artificial Sequence
  Synthetic Polynucleotide
atggccttaccagtgaccgccttgctcctgccgctggccttgctgctccacgccgccaggccgcaggccgtggttacacaagagcctagcctgacagtgtcccctggcggaacagtgaccctgacctgtagatcctctaccggcgctgtgaccaccagcaactatgccaactgggtgcagcagaagcctggacaggctcccagaggactgatcggcggcacaaacaaaagagccccttggacacccgccagattcagcggatcactgctcggaggaaaggccgctctgacactgtctggtgtccagcctgaggacgaggccgagtattattgcgccctgtggtacagcaaccacctggtgtttggcggaggcaccaagctgacagttcttctcgaggggaaaccaattcccaaccctcttctgggactggattcaaccggcagcggcgacaagcagctggacgccgacgtgtcccccaagcctaccatcttcctgccctctatcgccgagacaaagctccagaaggccggcacctacctgtgcctgctggaaaagttcttcccagatgtgattaagatccactggcaggaaaagaagtccaacaccatcctgggcagccaggaaggcaacaccatgaagaccaacgacacctacatgaagttcagctggctgaccgtgcccgagaagtccctggacaaagaacacagatgcatcgtgcggcacgaaaacaacaagaacggcgtggaccaggaaatcatcttcccacccatcaagaccgatgtgattacaatggaccccaaggacaactgctccaaggacgccaacgataccctgctgctccagctgaccaacaccagcgcctactacatgtacttgttgctgctgctgaagtccgtggtgtacttcgccatcatcacatgctgcctgctgcggagaaccgccttctgctgcaacggcgagaagtctagggccaagcgatctggatctggagcaacaaacttctcactactcaaacaagcaggtgacgtggaggagaatcccgggcctactagtatggactggatttggcgcatccttttccttgtcggcgctgctaccggcgcgcattccttcgaagaagttcagctggttgaatcaggcggtggcctggttcaacctggcggatctctgagactgagctgtgccgccagcggctttagcctgagcagaaattctgtgcactgggtccgacaggcccctggcaaaggacttgagtgggtcggaatgatctggggaggcggcagcaccgattacaacagcgccctgaagtcccggttcaccatcagcagagacaacagcaagaacaccctgtacctccagatgaacagcctgagagccgaggacaccgccgtgtactactgtgccagaaacggcggctacgacgtgttccactattggggccagggaaccaccgtgaccgttagctctacgcgtgagcagaaactgatctcggaagaggatgggagcggcagccagcctcacaccaagcccagcgtgttcgtgatgaagaacggcaccaacgtggcctgcctcgtgaaagagttctaccccaaggacatcaggatcaacctggtgtccagcaagaagatcaccgagttcgaccccgccatcgtgatctcccccagcggcaagtacaacgccgtgaagctggggaagtacgaggacagcaacagcgtgacctgctccgtgcagcacgacaacaagaccgtgcacagcaccgactttgaagtgaaaaccgactccaccgaccacgtgaagcccaaagagacagagaacaccaagcagcccagcaagagctgccacaagcccaaggccatcgtgcacaccgagaaagtgaacatgatgagcctgaccgtgctgggcctgcggatgctgttcgccaaaaccgtggccgtgaacttcctgctgaccgccaagctgttcttcctccgcgccaagagaagcggatctggcgtgaagcagaccctgaatttcgacctgctgaagctggctggcgacgtggaatccaacccaggcccttctagaggccatatgaccgagtacaagcccacggtgcgcctcgccacccgcgacgacgtccccagggccgtacgcaccctcgccgccgcgttcgccgactaccccgccacgcgccacaccgtcgatccggaccgccacatcgagcgggtcaccgagctgcaagaactcttcctcacgcgcgtcgggctcgacatcggcaaggtgtgggtcgcggacgacggcgccgcggtggcggtctggaccacgccggagagcgtcgaagcgggggcggtgttcgccgagatcggcccgcgcatggccgagttgagcggttcccggctggccgcgcagcaacagatggaaggcctcctggcgccgcaccggcccaaggagcccgcgtggttcctggccaccgtcggcgtctcgcccgaccaccagggcaagggtctgggcagcgccgtcgtgctccccggagtggaggcggccgagcgcgccggggtgcccgccttcctggagacctccgcgccccgcaacctccccttctacgagcggctcggcttcaccgtcaccgccgacgtcgaggtgcccgaaggaccgcgcacctggtgcatgacccgcaagcccggtgcctga

SEQ ID NO: 7770 - DNA, 1881 bp, Artificial Sequence
  Synthetic Polynucleotide
atggccttaccagtgaccgccttgctcctgccgctggccttgctgctccacgccgccaggccgcaggccgtggttacacaagagcctagcctgacagtgtcccctggcggaacagtgaccctgacctgtagatcctctaccggcgctgtgaccaccagcaactatgccaactgggtgcagcagaagcctggacaggctcccagaggactgatcggcggcacaaacaaaagagccccttggacacccgccagattcagcggatcactgctcggaggaaaggccgctctgacactgtctggtgtccagcctgaggacgaggccgagtattattgcgccctgtggtacagcaaccacctggtgtttggcggaggcaccaagctgacagttcttctcgagagccagcctcacaccaagcccagcgtgttcgtgatgaagaacggcaccaacgtggcctgcctcgtgaaagagttctaccccaaggacatcaggatcaacctggtgtccagcaagaagatcaccgagttcgaccccgccatcgtgatctcccccagcggcaagtacaacgccgtgaagctggggaagtacgaggacagcaacagcgtgacctgctccgtgcagcacgacaacaagaccgtgcacagcaccgactttgaagtgaaaaccgactccaccgaccacgtgaagcccaaagagacagagaacaccaagcagcccagcaagagctgccacaagcccaaggccatcgtgcacaccgagaaagtgaacatgatgagcctgaccgtgctgggcctgcggatgctgttcgccaaaaccgtggccgtgaacttcctgctgaccgccaagctgttcttcctcagggccaagcgatctggatctggagcaacaaacttctcactactcaaacaagcaggtgacgtggaggagaatcccgggcctactagtatggactggatttggcgcatccttttccttgtcggcgctgctaccggcgcgcattccttcgaagaagttcagctggttgaatcaggcggtggcctggttcaacctggcggatctctgagactgagctgtgccgccagcggctttagcctgagcagaaattctgtgcactgggtccgacaggcccctggcaaaggacttgagtgggtcggaatgatctggggaggcggcagcaccgattacaacagcgccctgaagtcccggttcaccatcagcagagacaacagcaagaacaccctgtacctccagatgaacagcctgagagccgaggacaccgccgtgtactactgtgccagaaacggcggctacgacgtgttccactattggggccagggaaccaccgtgaccgttagctctacgcgtgacaagcagctggacgccgacgtgtcccccaagcctaccatcttcctgccctctatcgccgagacaaagctccagaaggccggcacctacctgtgcctgctggaaaagttcttcccagatgtgattaagatccactggcaggaaaagaagtccaacaccatcctgggcagccaggaaggcaacaccatgaagaccaacgacacctacatgaagttcagctggctgaccgtgcccgagaagtccctggacaaagaacacagatgcatcgtgcggcacgaaaacaacaagaacggcgtggaccaggaaatcatcttcccacccatcaagaccgatgtgattacaatggaccccaaggacaactgctccaaggacgccaacgataccctgctgctccagctgaccaacaccagcgcctactacatgtacttgttgctgctgctgaagtccgtggtgtacttcgccatcatcacatgctgcctgctgcggagaaccgccttctgctgcaacggcgagaagtct

SEQ ID NO: 7771 - DNA, 2715 bp, Artificial Sequence
  Synthetic Polynucleotide
atggccttaccagtgaccgccttgctcctgccgctggccttgctgctccacgccgccaggccgctcgaggggaaaccaattcccaaccctcttctgggactggattcaaccggcagcggcgacaagcagctggacgccgacgtgtcccccaagcctaccatcttcctgccctctatcgccgagacaaagctccagaaggccggcacctacctgtgcctgctggaaaagttcttcccagatgtgattaagatccactggcaggaaaagaagtccaacaccatcctgggcagccaggaaggcaacaccatgaagaccaacgacacctacatgaagttcagctggctgaccgtgcccgagaagtccctggacaaagaacacagatgcatcgtgcggcacgaaaacaacaagaacggcgtggaccaggaaatcatcttcccacccatcaagaccgatgtgattacaatggaccccaaggacaactgctccaaggacgccaacgataccctgctgctccagctgaccaacaccagcgcctactacatgtacttgttgctgctgctgaagtccgtggtgtacttcgccatcatcacatgctgcctgctgcggagaaccgccttctgctgcaacggcgagaagtctagggccaagcgatctggatctggagcaacaaacttctcactactcaaacaagcaggtgacgtggaggagaatcccgggcctactagcatggccttaccagtgaccgccttgctcctgccgctggccttgctgctccacgccgccaggccgcaggccgtggttacacaagagcctagcctgacagtgtcccctggcggaacagtgaccctgacctgtagatcctctaccggcgctgtgaccaccagcaactatgccaactgggtgcagcagaagcctggacaggctcccagaggactgatcggcggcacaaacaaaagagccccttggacacccgccagattcagcggatcactgctcggaggaaaggccgctctgacactgtctggtgtccagcctgaggacgaggccgagtattattgcgccctgtggtacagcaaccacctggtgtttggcggaggcaccaagctgacagttcttggcggaggcggaagtggaggcggaggatctggcggcggaggctctgaagttcagctggttgaatcaggcggtggcctggttcaacctggcggatctctgagactgagctgtgccgccagcggctttagcctgagcagaaattctgtgcactgggtccgacaggcccctggcaaaggacttgagtgggtcggaatgatctggggaggcggcagcaccgattacaacagcgccctgaagtcccggttcaccatcagcagagacaacagcaagaacaccctgtacctccagatgaacagcctgagagccgaggacaccgccgtgtactactgtgccagaaacggcggctacgacgtgttccactattggggccagggaaccaccgtgaccgttagctctacgcgtgagcagaaactgatctcggaagaggatgggagcggcagccagcctcacaccaagcccagcgtgttcgtgatgaagaacggcaccaacgtggcctgcctcgtgaaagagttctaccccaaggacatcaggatcaacctggtgtccagcaagaagatcaccgagttcgaccccgccatcgtgatctcccccagcggcaagtacaacgccgtgaagctggggaagtacgaggacagcaacagcgtgacctgctccgtgcagcacgacaacaagaccgtgcacagcaccgactttgaagtgaaaaccgactccaccgaccacgtgaagcccaaagagacagagaacaccaagcagcccagcaagagctgccacaagcccaaggccatcgtgcacaccgagaaagtgaacatgatgagcctgaccgtgctgggcctgcggatgctgttcgccaaaaccgtggccgtgaacttcctgctgaccgccaagctgttcttcctccgcgccaagagaagcggatctggcgtgaagcagaccctgaatttcgacctgctgaagctggctggcgacgtggaatccaacccaggcccttctagaggccatatgaccgagtacaagcccacggtgcgcctcgccacccgcgacgacgtccccagggccgtacgcaccctcgccgccgcgttcgccgactaccccgccacgcgccacaccgtcgatccggaccgccacatcgagcgggtcaccgagctgcaagaactcttcctcacgcgcgtcgggctcgacatcggcaaggtgtgggtcgcggacgacggcgccgcggtggcggtctggaccacgccggagagcgtcgaagcgggggcggtgttcgccgagatcggcccgcgcatggccgagttgagcggttcccggctggccgcgcagcaacagatggaaggcctcctggcgccgcaccggcccaaggagcccgcgtggttcctggccaccgtcggcgtctcgcccgaccaccagggcaagggtctgggcagcgccgtcgtgctccccggagtggaggcggccgagcgcgccggggtgcccgccttcctggagacctccgcgccccgcaacctccccttctacgagcggctcggcttcaccgtcaccgccgacgtcgaggtgcccgaaggaccgcgcacctggtgcatgacccgcaagcccggtgcctga

SEQ ID NO: 7772 - DNA, 3090 bp, Artificial Sequence
  Synthetic Polynucleotide
atggccttaccagtgaccgccttgctcctgccgctggccttgctgctccacgccgccaggccgcaggccgtggttacacaagagcctagcctgacagtgtcccctggcggaacagtgaccctgacctgtagatcctctaccggcgctgtgaccaccagcaactatgccaactgggtgcagcagaagcctggacaggctcccagaggactgatcggcggcacaaacaaaagagccccttggacacccgccagattcagcggatcactgctcggaggaaaggccgctctgacactgtctggtgtccagcctgaggacgaggccgagtattattgcgccctgtggtacagcaaccacctggtgtttggcggaggcaccaagctgacagttcttggacagcctaaggccaatcctaccgtgacactgttccctccaagcagcgaagaactccaggccaacaaggccacacttgtgtgcctgatctccgacttctaccctggggctgtgacagtggcttggaaggccgatggatctcctgtgaaagccggcgtggaaaccaccaagccatccaagcagagcaacaacaaatacgccgccagctcctacctgagcctgacacctgagcagtggaagtcccacagatcctacagctgccaagtgacccacgaaggcagcaccgtggaaaagacagtggcccctacagagtgcagcggatcccagagcttcggcctgctggaccccaagctgtgctacctgctggatggcatcctgttcatctacggcgtgatcctgaccgccctgttcctgagagtgaagttcagcagaagcgccgacgcccctgcctaccagcagggacagaaccaactgtacaacgagctgaacctgggcagacgggaagagtacgacgtgctggacaagcggagaggcagggaccctgagatgggcggaaagccccagcggagaaagaacccccaggaaggactgtataacgaactccagaaagacaagatggccgaagcctacagcgagatcggcatgaagggcgagcggagaagaggcaagggccacgatggcctgtaccagggcctgagcaccgccaccaaggacacctatgacgccctgcacatgcaggccctgcctccaagaagggccaagcgatctggatctggagcaacaaacttctcactactcaaacaagcaggtgacgtggaggagaatcccgggcctactagtatggactggatttggcgcatccttttccttgtcggcgctgctaccggcgcgcattccttcgaagaagttcagctggttgaatcaggcggtggcctggttcaacctggcggatctctgagactgagctgtgccgccagcggctttagcctgagcagaaattctgtgcactgggtccgacaggcccctggcaaaggacttgagtgggtcggaatgatctggggaggcggcagcaccgattacaacagcgccctgaagtcccggttcaccatcagcagagacaacagcaagaacaccctgtacctccagatgaacagcctgagagccgaggacaccgccgtgtactactgtgccagaaacggcggctacgacgtgttccactattggggccagggaaccaccgtgaccgttagctctgcctctacaaagggaccctccgtgtttcctctggctcccagcagcaagtctacaagcggaggaacagccgctctgggctgcctggtcaaggattactttcccgagcctgtgaccgtgtcctggaatagcggagcactgacaagcggcgtgcacacctttccagccgtgctgcaaagcagcggcctgtactctctgagcagcgtggtcacagtgcctagctctagcctgggcacccagacctacatctgcaatgtgaaccacaagcctagcaacaccaaggtggacaagagagtggaacccaagagctgtggtacccagagttttgggttgttggaccctaaattgtgctatctgttggacggaatcctgttcatttacggagtgatcctgaccgcattgttcctgcgggttaagttttccagatccgcagacgcacccgcttaccaacaagggcagaaccaactctacaatgaacttaatttggggcggagggaagagtacgacgttctggacaaaaggaggggacgagatcccgagatgggcggaaagcctcagcgaaggaagaatccgcaagaggggctttataacgaactccagaaagataaaatggcagaagcctatagtgagattgggatgaagggagaaaggaggaggggtaaaggtcacgatgggttgtaccaaggattgagcacagccactaaagatacctatgatgcgctccacatgcaggccctgccgccaagacgcgccaagagaagcggatctggcgtgaagcagaccctgaatttcgacctgctgaagctggctggcgacgtggaatccaacccaggcccttctagaggccatatgaccgagtacaagcccacggtgcgcctcgccacccgcgacgacgtccccagggccgtacgcaccctcgccgccgcgttcgccgactaccccgccacgcgccacaccgtcgatccggaccgccacatcgagcgggtcaccgagctgcaagaactcttcctcacgcgcgtcgggctcgacatcggcaaggtgtgggtcgcggacgacggcgccgcggtggcggtctggaccacgccggagagcgtcgaagcgggggcggtgttcgccgagatcggcccgcgcatggccgagttgagcggttcccggctggccgcgcagcaacagatggaaggcctcctggcgccgcaccggcccaaggagcccgcgtggttcctggccaccgtcggcgtctcgcccgaccaccagggcaagggtctgggcagcgccgtcgtgctccccggagtggaggcggccgagcgcgccggggtgcccgccttcctggagacctccgcgccccgcaacctccccttctacgagcggctcggcttcaccgtcaccgccgacgtcgaggtgcccgaaggaccgcgcacctggtgcatgacccgcaagcccggtgcctga

SEQ ID NO: 7773 - DNA, 2445 bp, Artificial Sequence
  Synthetic Polynucleotide
atggccttaccagtgaccgccttgctcctgccgctggccttgctgctccacgccgccaggccgcaggccgtggttacacaagagcctagcctgacagtgtcccctggcggaacagtgaccctgacctgtagatcctctaccggcgctgtgaccaccagcaactatgccaactgggtgcagcagaagcctggacaggctcccagaggactgatcggcggcacaaacaaaagagccccttggacacccgccagattcagcggatcactgctcggaggaaaggccgctctgacactgtctggtgtccagcctgaggacgaggccgagtattattgcgccctgtggtacagcaaccacctggtgtttggcggaggcaccaagctgacagttcttctcgaggacctgaagaacgtgttcccacctgaggtggccgtgttcgagcctagcgaggccgagatcagccacacccagaaagccaccctcgtgtgcctggctaccggcttctaccccgaccatgtggaactgtcttggtgggtcaacggcaaagaggtgcacagcggcgtgtctaccgacccccagccactgaaagaacagcccgccctgaacgacagccggtactgcctgagcagcagactgagagtgtccgccaccttctggcagaacccccggaaccacttcagatgccaggtgcagttctacggcctgagcgagaacgacgagtggacccaggacagagccaagcccgtgacccagatcgtgtctgccgaagcctggggcagagccgattgcggatcccagagcttcggcctgctggaccccaagctgtgctacctgctggatggcatcctgttcatctacggcgtgatcctgaccgccctgttcctgagagtgaagttcagcagaagcgccgacgcccctgcctaccagcagggacagaaccaactgtacaacgagctgaacctgggcagacgggaagagtacgacgtgctggacaagcggagaggcagggaccctgagatgggcggaaagccccagcggagaaagaacccccaggaaggactgtataacgaactccagaaagacaagatggccgaagcctacagcgagatcggcatgaagggcgagcggagaagaggcaagggccacgatggcctgtaccagggcctgagcaccgccaccaaggacacctatgacgccctgcacatgcaggccctgcctccaagaagggccaagcgatctggatctggagcaacaaacttctcactactcaaacaagcaggtgacgtggaggagaatcccgggcctactagtatggactggatttggcgcatccttttccttgtcggcgctgctaccggcgcgcattccttcgaagaagttcagctggttgaatcaggcggtggcctggttcaacctggcggatctctgagactgagctgtgccgccagcggctttagcctgagcagaaattctgtgcactgggtccgacaggcccctggcaaaggacttgagtgggtcggaatgatctggggaggcggcagcaccgattacaacagcgccctgaagtcccggttcaccatcagcagagacaacagcaagaacaccctgtacctccagatgaacagcctgagagccgaggacaccgccgtgtactactgtgccagaaacggcggctacgacgtgttccactattggggccagggaaccaccgtgaccgttagctctacgcgtatccagaaccctgatcctgccgtgtaccagctgcgggatagcaagagcagcgacaagagcgtgtgtctgttcaccgacttcgacagccagaccaacgtgtcccagagcaaggactccgacgtgtacatcaccgataagaccgtgctggacatgcggagcatggacttcaagagcaactccgccgtggcctggtccaacaagtccgatttcgcctgcgccaacgccttcaacaacagcattatccccgaggacacattcttcccaagccccgagagcagctgcggtacccagagttttgggttgttggaccctaaattgtgctatctgttggacggaatcctgttcatttacggagtgatcctgaccgcattgttcctgcgggttaagttttccagatccgcagacgcacccgcttaccaacaagggcagaaccaactctacaatgaacttaatttggggcggagggaagagtacgacgttctggacaaaaggaggggacgagatcccgagatgggcggaaagcctcagcgaaggaagaatccgcaagaggggctttataacgaactccagaaagataaaatggcagaagcctatagtgagattgggatgaagggagaaaggaggaggggtaaaggtcacgatgggttgtaccaaggattgagcacagccactaaagatacctatgatgcgctccacatgcaggccctgccgccaaga

SEQ ID NO: 7774 - DNA, 2445 bp, Artificial Sequence
  Synthetic Polynucleotide
atggccttaccagtgaccgccttgctcctgccgctggccttgctgctccacgccgccaggccgcaggccgtggttacacaagagcctagcctgacagtgtcccctggcggaacagtgaccctgacctgtagatcctctaccggcgctgtgaccaccagcaactatgccaactgggtgcagcagaagcctggacaggctcccagaggactgatcggcggcacaaacaaaagagccccttggacacccgccagattcagcggatcactgctcggaggaaaggccgctctgacactgtctggtgtccagcctgaggacgaggccgagtattattgcgccctgtggtacagcaaccacctggtgtttggcggaggcaccaagctgacagttcttctcgaggacctgaagaacgtgttcccacctgaggtggccgtgttcgagcctagcaaggccgagatcgcccacacccagaaagccaccctcgtgtgcctggctaccggcttctaccccgaccatgtggaactgtcttggtgggtcaacggcaaagaggtgcacagcggcgtgtgtaccgacccccagccactgaaagaacagcccgccctgaacgacagccggtactgcctgagcagcagactgagagtgtccgccaccttctggcagaacccccggaaccacttcagatgccaggtgcagttctacggcctgagcgagaacgacgagtggacccaggacagagccaagcccgtgacccagatcgtgtctgccgaagcctggggcagagccgattgcggatcccagagcttcggcctgctggaccccaagctgtgctacctgctggatggcatcctgttcatctacggcgtgatcctgaccgccctgttcctgagagtgaagttcagcagaagcgccgacgcccctgcctaccagcagggacagaaccaactgtacaacgagctgaacctgggcagacgggaagagtacgacgtgctggacaagcggagaggcagggaccctgagatgggcggaaagccccagcggagaaagaacccccaggaaggactgtataacgaactccagaaagacaagatggccgaagcctacagcgagatcggcatgaagggcgagcggagaagaggcaagggccacgatggcctgtaccagggcctgagcaccgccaccaaggacacctatgacgccctgcacatgcaggccctgcctccaagaagggccaagcgatctggatctggagcaacaaacttctcactactcaaacaagcaggtgacgtggaggagaatcccgggcctactagtatggactggatttggcgcatccttttccttgtcggcgctgctaccggcgcgcattccttcgaagaagttcagctggttgaatcaggcggtggcctggttcaacctggcggatctctgagactgagctgtgccgccagcggctttagcctgagcagaaattctgtgcactgggtccgacaggcccctggcaaaggacttgagtgggtcggaatgatctggggaggcggcagcaccgattacaacagcgccctgaagtcccggttcaccatcagcagagacaacagcaagaacaccctgtacctccagatgaacagcctgagagccgaggacaccgccgtgtactactgtgccagaaacggcggctacgacgtgttccactattggggccagggaaccaccgtgaccgttagctctacgcgtatccagaaccctgatcctgccgtgtaccagctgcgggatagcaagagcagcgacaagagcgtgtgtctgttcaccgacttcgacagccagaccaacgtgtcccagagcaaggactccgacgtgtacatcaccgataagtgcgtgctggacatgcggagcatggacttcaagagcaactccgccgtggcctggtccaacaagtccgatttcgcctgcgccaacgccttcaacaacagcattatccccgaggacacattcttcccaagcagcgacgtgccctgcggtacccagagttttgggttgttggaccctaaattgtgctatctgttggacggaatcctgttcatttacggagtgatcctgaccgcattgttcctgcgggttaagttttccagatccgcagacgcacccgcttaccaacaagggcagaaccaactctacaatgaacttaatttggggcggagggaagagtacgacgttctggacaaaaggaggggacgagatcccgagatgggcggaaagcctcagcgaaggaagaatccgcaagaggggctttataacgaactccagaaagataaaatggcagaagcctatagtgagattgggatgaagggagaaaggaggaggggtaaaggtcacgatgggttgtaccaaggattgagcacagccactaaagatacctatgatgcgctccacatgcaggccctgccgccaaga

SEQ ID NO: 7775 - DNA, 2658 bp, Artificial Sequence
  Synthetic Polynucleotide
atggccttaccagtgaccgccttgctcctgccgctggccttgctgctccacgccgccaggccgcaggccgtggttacacaagagcctagcctgacagtgtcccctggcggaacagtgaccctgacctgtagatcctctaccggcgctgtgaccaccagcaactatgccaactgggtgcagcagaagcctggacaggctcccagaggactgatcggcggcacaaacaaaagagccccttggacacccgccagattcagcggatcactgctcggaggaaaggccgctctgacactgtctggtgtccagcctgaggacgaggccgagtattattgcgccctgtggtacagcaaccacctggtgtttggcggaggcaccaagctgacagttcttctcgaggggaaaccaattcccaaccctcttctgggactggattcaaccggcagcggcgaggacctgaagaacgtgttcccacctgaggtggccgtgttcgagcctagcgaggccgagatcagccacacccagaaagccaccctcgtgtgcctggctaccggcttctaccccgaccatgtggaactgtcttggtgggtcaacggcaaagaggtgcacagcggcgtgtctaccgacccccagccactgaaagaacagcccgccctgaacgacagccggtactgcctgagcagcagactgagagtgtccgccaccttctggcagaacccccggaaccacttcagatgccaggtgcagttctacggcctgagcgagaacgacgagtggacccaggacagagccaagcccgtgacccagatcgtgtctgccgaagcctggggcagagccgattgcggatcccagagcttcggcctgctggaccccaagctgtgctacctgctggatggcatcctgttcatctacggcgtgatcctgaccgccctgttcctgagagtgaagttcagcagaagcgccgacgcccctgcctaccagcagggacagaaccaactgtacaacgagctgaacctgggcagacgggaagagtacgacgtgctggacaagcggagaggcagggaccctgagatgggcggaaagccccagcggagaaagaacccccaggaaggactgtataacgaactccagaaagacaagatggccgaagcctacagcgagatcggcatgaagggcgagcggagaagaggcaagggccacgatggcctgtaccagggcctgagcaccgccaccaaggacacctatgacgccctgcacatgcaggccctgcctccaagaagggccaagcgatctggatctggagcaacaaacttctcactactcaaacaagcaggtgacgtggaggagaatcccgggcctactagtatggactggatttggcgcatccttttccttgtcggcgctgctaccggcgcgcattccttcgaagaagttcagctggttgaatcaggcggtggcctggttcaacctggcggatctctgagactgagctgtgccgccagcggctttagcctgagcagaaattctgtgcactgggtccgacaggcccctggcaaaggacttgagtgggtcggaatgatctggggaggcggcagcaccgattacaacagcgccctgaagtcccggttcaccatcagcagagacaacagcaagaacaccctgtacctccagatgaacagcctgagagccgaggacaccgccgtgtactactgtgccagaaacggcggctacgacgtgttccactattggggccagggaaccaccgtgaccgttagctctacgcgtgagcagaaactgatctcggaagaggatgggagcggcatccagaaccctgatcctgccgtgtaccagctgcgggatagcaagagcagcgacaagagcgtgtgtctgttcaccgacttcgacagccagaccaacgtgtcccagagcaaggactccgacgtgtacatcaccgataagaccgtgctggacatgcggagcatggacttcaagagcaactccgccgtggcctggtccaacaagtccgatttcgcctgcgccaacgccttcaacaacagcattatccccgaggacacattcttcccaagccccgagagcagctgcggtacccagagttttgggttgttggaccctaaattgtgctatctgttggacggaatcctgttcatttacggagtgatcctgaccgcattgttcctgaggagcaagcggtcacggctgctccacagcgattacatgaatatgacaccacgaagaccgggtcctactcgcaaacactaccaaccctacgcacctccccgcgactttgcagcgtaccgatctcgggttaagttttccagatccgcagacgcacccgcttaccaacaagggcagaaccaactctacaatgaacttaatttggggcggagggaagagtacgacgttctggacaaaaggaggggacgagatcccgagatgggcggaaagcctcagcgaaggaagaatccgcaagaggggctttataacgaactccagaaagataaaatggcagaagcctatagtgagattgggatgaagggagaaaggaggaggggtaaaggtcacgatgggttgtaccaaggattgagcacagccactaaagatacctatgatgcgctccacatgcaggccctgccgccaaga

SEQ ID NO: 7776 - DNA, 2781 bp, Artificial Sequence
  Synthetic Polynucleotide
atggccttaccagtgaccgccttgctcctgccgctggccttgctgctccacgccgccaggccgcaggccgtggttacacaagagcctagcctgacagtgtcccctggcggaacagtgaccctgacctgtagatcctctaccggcgctgtgaccaccagcaactatgccaactgggtgcagcagaagcctggacaggctcccagaggactgatcggcggcacaaacaaaagagccccttggacacccgccagattcagcggatcactgctcggaggaaaggccgctctgacactgtctggtgtccagcctgaggacgaggccgagtattattgcgccctgtggtacagcaaccacctggtgtttggcggaggcaccaagctgacagttcttctcgaggggaaaccaattcccaaccctcttctgggactggattcaaccggcagcggcgaggacctgaagaacgtgttcccacctgaggtggccgtgttcgagcctagcgaggccgagatcagccacacccagaaagccaccctcgtgtgcctggctaccggcttctaccccgaccatgtggaactgtcttggtgggtcaacggcaaagaggtgcacagcggcgtgtctaccgacccccagccactgaaagaacagcccgccctgaacgacagccggtactgcctgagcagcagactgagagtgtccgccaccttctggcagaacccccggaaccacttcagatgccaggtgcagttctacggcctgagcgagaacgacgagtggacccaggacagagccaagcccgtgacccagatcgtgtctgccgaagcctggggcagagccgattgcggatcccagagcttcggcctgctggaccccaagctgtgctacctgctggatggcatcctgttcatctacggcgtgatcctgaccgccctgttcctgaggagtaagaggagcaggctcctgcacagtgactacatgaacatgactccacgccgccccggacccacccgcaagcattaccagccctatgccccaccacgcgacttcgcagcctatcgctccagagtgaagttcagcagaagcgccgacgcccctgcctaccagcagggacagaaccaactgtacaacgagctgaacctgggcagacgggaagagtacgacgtgctggacaagcggagaggcagggaccctgagatgggcggaaagccccagcggagaaagaacccccaggaaggactgtataacgaactccagaaagacaagatggccgaagcctacagcgagatcggcatgaagggcgagcggagaagaggcaagggccacgatggcctgtaccagggcctgagcaccgccaccaaggacacctatgacgccctgcacatgcaggccctgcctccaagaagggccaagcgatctggatctggagcaacaaacttctcactactcaaacaagcaggtgacgtggaggagaatcccgggcctactagtatggactggatttggcgcatccttttccttgtcggcgctgctaccggcgcgcattccttcgaagaagttcagctggttgaatcaggcggtggcctggttcaacctggcggatctctgagactgagctgtgccgccagcggctttagcctgagcagaaattctgtgcactgggtccgacaggcccctggcaaaggacttgagtgggtcggaatgatctggggaggcggcagcaccgattacaacagcgccctgaagtcccggttcaccatcagcagagacaacagcaagaacaccctgtacctccagatgaacagcctgagagccgaggacaccgccgtgtactactgtgccagaaacggcggctacgacgtgttccactattggggccagggaaccaccgtgaccgttagctctacgcgtgagcagaaactgatctcggaagaggatgggagcggcatccagaaccctgatcctgccgtgtaccagctgcgggatagcaagagcagcgacaagagcgtgtgtctgttcaccgacttcgacagccagaccaacgtgtcccagagcaaggactccgacgtgtacatcaccgataagaccgtgctggacatgcggagcatggacttcaagagcaactccgccgtggcctggtccaacaagtccgatttcgcctgcgccaacgccttcaacaacagcattatccccgaggacacattcttcccaagccccgagagcagctgcggtacccagagttttgggttgttggaccctaaattgtgctatctgttggacggaatcctgttcatttacggagtgatcctgaccgcattgttcctgaggagcaagcggtcacggctgctccacagcgattacatgaatatgacaccacgaagaccgggtcctactcgcaaacactaccaaccctacgcacctccccgcgactttgcagcgtaccgatctcgggttaagttttccagatccgcagacgcacccgcttaccaacaagggcagaaccaactctacaatgaacttaatttggggcggagggaagagtacgacgttctggacaaaaggaggggacgagatcccgagatgggcggaaagcctcagcgaaggaagaatccgcaagaggggctttataacgaactccagaaagataaaatggcagaagcctatagtgagattgggatgaagggagaaaggaggaggggtaaaggtcacgatgggttgtaccaaggattgagcacagccactaaagatacctatgatgcgctccacatgcaggccctgccgccaaga

SEQ ID NO: 7777 - DNA, 2664 bp, Artificial Sequence
  Synthetic Polynucleotide
atggccttaccagtgaccgccttgctcctgccgctggccttgctgctccacgccgccaggccgcaggccgtggttacacaagagcctagcctgacagtgtcccctggcggaacagtgaccctgacctgtagatcctctaccggcgctgtgaccaccagcaactatgccaactgggtgcagcagaagcctggacaggctcccagaggactgatcggcggcacaaacaaaagagccccttggacacccgccagattcagcggatcactgctcggaggaaaggccgctctgacactgtctggtgtccagcctgaggacgaggccgagtattattgcgccctgtggtacagcaaccacctggtgtttggcggaggcaccaagctgacagttcttctcgaggggaaaccaattcccaaccctcttctgggactggattcaaccggcagcggcgaggacctgaagaacgtgttcccacctgaggtggccgtgttcgagcctagcgaggccgagatcagccacacccagaaagccaccctcgtgtgcctggctaccggcttctaccccgaccatgtggaactgtcttggtgggtcaacggcaaagaggtgcacagcggcgtgtctaccgacccccagccactgaaagaacagcccgccctgaacgacagccggtactgcctgagcagcagactgagagtgtccgccaccttctggcagaacccccggaaccacttcagatgccaggtgcagttctacggcctgagcgagaacgacgagtggacccaggacagagccaagcccgtgacccagatcgtgtctgccgaagcctggggcagagccgattgcggatcccagagcttcggcctgctggaccccaagctgtgctacctgctggatggcatcctgttcatctacggcgtgatcctgaccgccctgttcctgagagtgaagttcagcagaagcgccgacgcccctgcctaccagcagggacagaaccaactgtacaacgagctgaacctgggcagacgggaagagtacgacgtgctggacaagcggagaggcagggaccctgagatgggcggaaagccccagcggagaaagaacccccaggaaggactgtataacgaactccagaaagacaagatggccgaagcctacagcgagatcggcatgaagggcgagcggagaagaggcaagggccacgatggcctgtaccagggcctgagcaccgccaccaaggacacctatgacgccctgcacatgcaggccctgcctccaagaagggccaagcgatctggatctggagcaacaaacttctcactactcaaacaagcaggtgacgtggaggagaatcccgggcctactagtatggactggatttggcgcatccttttccttgtcggcgctgctaccggcgcgcattccttcgaagaagttcagctggttgaatcaggcggtggcctggttcaacctggcggatctctgagactgagctgtgccgccagcggctttagcctgagcagaaattctgtgcactgggtccgacaggcccctggcaaaggacttgagtgggtcggaatgatctggggaggcggcagcaccgattacaacagcgccctgaagtcccggttcaccatcagcagagacaacagcaagaacaccctgtacctccagatgaacagcctgagagccgaggacaccgccgtgtactactgtgccagaaacggcggctacgacgtgttccactattggggccagggaaccaccgtgaccgttagctctacgcgtgagcagaaactgatctcggaagaggatctggggagcggcatccagaaccctgatcctgccgtgtaccagctgcgggatagcaagagcagcgacaagagcgtgtgtctgttcaccgacttcgacagccagaccaacgtgtcccagagcaaggactccgacgtgtacatcaccgataagaccgtgctggacatgcggagcatggacttcaagagcaactccgccgtggcctggtccaacaagtccgatttcgcctgcgccaacgccttcaacaacagcattatccccgaggacacattcttcccaagccccgagagcagctgcggtacccagagttttgggttgttggaccctaaattgtgctatctgttggacggaatcctgttcatttacggagtgatcctgaccgcattgttcctgaagagaggccggaagaagctgctgtacatcttcaagcagcctttcatgcggcccgtgcagaccacccaggaagaggacggctgctcctgccggttccccgaggaagaagaaggcggctgcgagctgcgggttaagttttccagatccgcagacgcacccgcttaccaacaagggcagaaccaactctacaatgaacttaatttggggcggagggaagagtacgacgttctggacaaaaggaggggacgagatcccgagatgggcggaaagcctcagcgaaggaagaatccgcaagaggggctttataacgaactccagaaagataaaatggcagaagcctatagtgagattgggatgaagggagaaaggaggaggggtaaaggtcacgatgggttgtaccaaggattgagcacagccactaaagatacctatgatgcgctccacatgcaggccctgccgccaaga

SEQ ID NO: 7778 - DNA, 2790 bp, Artificial Sequence
  Synthetic Polynucleotide
atggccttaccagtgaccgccttgctcctgccgctggccttgctgctccacgccgccaggccgcaggccgtggttacacaagagcctagcctgacagtgtcccctggcggaacagtgaccctgacctgtagatcctctaccggcgctgtgaccaccagcaactatgccaactgggtgcagcagaagcctggacaggctcccagaggactgatcggcggcacaaacaaaagagccccttggacacccgccagattcagcggatcactgctcggaggaaaggccgctctgacactgtctggtgtccagcctgaggacgaggccgagtattattgcgccctgtggtacagcaaccacctggtgtttggcggaggcaccaagctgacagttcttctcgaggggaaaccaattcccaaccctcttctgggactggattcaaccggcagcggcgaggacctgaagaacgtgttcccacctgaggtggccgtgttcgagcctagcgaggccgagatcagccacacccagaaagccaccctcgtgtgcctggctaccggcttctaccccgaccatgtggaactgtcttggtgggtcaacggcaaagaggtgcacagcggcgtgtctaccgacccccagccactgaaagaacagcccgccctgaacgacagccggtactgcctgagcagcagactgagagtgtccgccaccttctggcagaacccccggaaccacttcagatgccaggtgcagttctacggcctgagcgagaacgacgagtggacccaggacagagccaagcccgtgacccagatcgtgtctgccgaagcctggggcagagccgattgcggatcccagagcttcggcctgctggaccccaagctgtgctacctgctggatggcatcctgttcatctacggcgtgatcctgaccgccctgttcctgaaacggggcagaaagaaactcctgtatatattcaaacaaccatttatgagaccagtacaaactactcaagaggaagatggctgtagctgccgatttccagaagaagaagaaggaggatgtgaactgagagtgaagttcagcagaagcgccgacgcccctgcctaccagcagggacagaaccaactgtacaacgagctgaacctgggcagacgggaagagtacgacgtgctggacaagcggagaggcagggaccctgagatgggcggaaagccccagcggagaaagaacccccaggaaggactgtataacgaactccagaaagacaagatggccgaagcctacagcgagatcggcatgaagggcgagcggagaagaggcaagggccacgatggcctgtaccagggcctgagcaccgccaccaaggacacctatgacgccctgcacatgcaggccctgcctccaagaagggccaagcgatctggatctggagcaacaaacttctcactactcaaacaagcaggtgacgtggaggagaatcccgggcctactagtatggactggatttggcgcatccttttccttgtcggcgctgctaccggcgcgcattccttcgaagaagttcagctggttgaatcaggcggtggcctggttcaacctggcggatctctgagactgagctgtgccgccagcggctttagcctgagcagaaattctgtgcactgggtccgacaggcccctggcaaaggacttgagtgggtcggaatgatctggggaggcggcagcaccgattacaacagcgccctgaagtcccggttcaccatcagcagagacaacagcaagaacaccctgtacctccagatgaacagcctgagagccgaggacaccgccgtgtactactgtgccagaaacggcggctacgacgtgttccactattggggccagggaaccaccgtgaccgttagctctacgcgtgagcagaaactgatctcggaagaggatctggggagcggcatccagaaccctgatcctgccgtgtaccagctgcgggatagcaagagcagcgacaagagcgtgtgtctgttcaccgacttcgacagccagaccaacgtgtcccagagcaaggactccgacgtgtacatcaccgataagaccgtgctggacatgcggagcatggacttcaagagcaactccgccgtggcctggtccaacaagtccgatttcgcctgcgccaacgccttcaacaacagcattatccccgaggacacattcttcccaagccccgagagcagctgcggtacccagagttttgggttgttggaccctaaattgtgctatctgttggacggaatcctgttcatttacggagtgatcctgaccgcattgttcctgaagagaggccggaagaagctgctgtacatcttcaagcagcctttcatgcggcccgtgcagaccacccaggaagaggacggctgctcctgccggttccccgaggaagaagaaggcggctgcgagctgcgggttaagttttccagatccgcagacgcacccgcttaccaacaagggcagaaccaactctacaatgaacttaatttggggcggagggaagagtacgacgttctggacaaaaggaggggacgagatcccgagatgggcggaaagcctcagcgaaggaagaatccgcaagaggggctttataacgaactccagaaagataaaatggcagaagcctatagtgagattgggatgaagggagaaaggaggaggggtaaaggtcacgatgggttgtaccaaggattgagcacagccactaaagatacctatgatgcgctccacatgcaggccctgccgccaaga

SEQ ID NO: 7779 - DNA, 2463 bp, Artificial Sequence
  Synthetic Polynucleotide
atggccttaccagtgaccgccttgctcctgccgctggccttgctgctccacgccgccaggccgcaggccgtggttacacaagagcctagcctgacagtgtcccctggcggaacagtgaccctgacctgtagatcctctaccggcgctgtgaccaccagcaactatgccaactgggtgcagcagaagcctggacaggctcccagaggactgatcggcggcacaaacaaaagagccccttggacacccgccagattcagcggatcactgctcggaggaaaggccgctctgacactgtctggtgtccagcctgaggacgaggccgagtattattgcgccctgtggtacagcaaccacctggtgtttggcggaggcaccaagctgacagttcttctcgagcagagcttcggcctgctggaccccaagctgtgctacctgctggatggcatcctgttcatctacggcgtgatcctgaccgccctgttcctgagagtgaagttcagcagaagcgccgacgcccctgcctaccagcagggacagaaccaactgtacaacgagctgaacctgggcagacgggaagagtacgacgtgctggacaagcggagaggcagggaccctgagatgggcggaaagccccagcggagaaagaacccccaggaaggactgtataacgaactccagaaagacaagatggccgaagcctacagcgagatcggcatgaagggcgagcggagaagaggcaagggccacgatggcctgtaccagggcctgagcaccgccaccaaggacacctatgacgccctgcacatgcaggccctgcctccaagaagggccaagcgatctggatctggagcaacaaacttctcactactcaaacaagcaggtgacgtggaggagaatcccgggcctactagtatggactggatttggcgcatccttttccttgtcggcgctgctaccggcgcgcattccttcgaagaagttcagctggttgaatcaggcggtggcctggttcaacctggcggatctctgagactgagctgtgccgccagcggctttagcctgagcagaaattctgtgcactgggtccgacaggcccctggcaaaggacttgagtgggtcggaatgatctggggaggcggcagcaccgattacaacagcgccctgaagtcccggttcaccatcagcagagacaacagcaagaacaccctgtacctccagatgaacagcctgagagccgaggacaccgccgtgtactactgtgccagaaacggcggctacgacgtgttccactattggggccagggaaccaccgtgaccgttagctctacgcgtcagagttttgggttgttggaccctaaattgtgctatctgttggacggaatcctgttcatttacggagtgatcctgaccgcattgttcctgcgggttaagttttccagatccgcagacgcacccgcttaccaacaagggcagaaccaactctacaatgaacttaatttggggcggagggaagagtacgacgttctggacaaaaggaggggacgagatcccgagatgggcggaaagcctcagcgaaggaagaatccgcaagaggggctttataacgaactccagaaagataaaatggcagaagcctatagtgagattgggatgaagggagaaaggaggaggggtaaaggtcacgatgggttgtaccaaggattgagcacagccactaaagatacctatgatgcgctccacatgcaggccctgccgccaagacgcgccaagagaagcggatctggcgtgaagcagaccctgaatttcgacctgctgaagctggctggcgacgtggaatccaacccaggcccttctagaggccatatgaccgagtacaagcccacggtgcgcctcgccacccgcgacgacgtccccagggccgtacgcaccctcgccgccgcgttcgccgactaccccgccacgcgccacaccgtcgatccggaccgccacatcgagcgggtcaccgagctgcaagaactcttcctcacgcgcgtcgggctcgacatcggcaaggtgtgggtcgcggacgacggcgccgcggtggcggtctggaccacgccggagagcgtcgaagcgggggcggtgttcgccgagatcggcccgcgcatggccgagttgagcggttcccggctggccgcgcagcaacagatggaaggcctcctggcgccgcaccggcccaaggagcccgcgtggttcctggccaccgtcggcgtctcgcccgaccaccagggcaagggtctgggcagcgccgtcgtgctccccggagtggaggcggccgagcgcgccggggtgcccgccttcctggagacctccgcgccccgcaacctccccttctacgagcggctcggcttcaccgtcaccgccgacgtcgaggtgcccgaaggaccgcgcacctggtgcatgacccgcaagcccggtgcctga

SEQ ID NO: 7780 - DNA, 1935 bp, Artificial Sequence
  Synthetic Polynucleotide
atggccttaccagtgaccgccttgctcctgccgctggccttgctgctccacgccgccaggccgcaggccgtggttacacaagagcctagcctgacagtgtcccctggcggaacagtgaccctgacctgtagatcctctaccggcgctgtgaccaccagcaactatgccaactgggtgcagcagaagcctggacaggctcccagaggactgatcggcggcacaaacaaaagagccccttggacacccgccagattcagcggatcactgctcggaggaaaggccgctctgacactgtctggtgtccagcctgaggacgaggccgagtattattgcgccctgtggtacagcaaccacctggtgtttggcggaggcaccaagctgacagttcttctcgagggacagcctaaggccaatcctaccgtgacactgttccctccaagcagcgaagaactccaggccaacaaggccacacttgtgtgcctgatctccgacttctaccctggggctgtgacagtggcttggaaggccgatggatctcctgtgaaagccggcgtggaaaccaccaagccatccaagcagagcaacaacaaatacgccgccagctcctacctgagcctgacacctgagcagtggaagtcccacagatcctacagctgccaagtgacccacgaaggcagcaccgtggaaaagacagtggcccctacagagtgcagccccatcaagaccgatgtgattacaatggaccccaaggacaactgctccaaggacgccaacgataccctgctgctccagctgaccaacaccagcgcctactacatgtacttgttgctgctgctgaagtccgtggtgtacttcgccatcatcacatgctgcctgctgcggagaaccgccttctgctgcaacggcgagaagtctagggccaagcgatctggatctggagcaacaaacttctcactactcaaacaagcaggtgacgtggaggagaatcccgggcctactagtatggactggatttggcgcatccttttccttgtcggcgctgctaccggcgcgcattccttcgaagaagttcagctggttgaatcaggcggtggcctggttcaacctggcggatctctgagactgagctgtgccgccagcggctttagcctgagcagaaattctgtgcactgggtccgacaggcccctggcaaaggacttgagtgggtcggaatgatctggggaggcggcagcaccgattacaacagcgccctgaagtcccggttcaccatcagcagagacaacagcaagaacaccctgtacctccagatgaacagcctgagagccgaggacaccgccgtgtactactgtgccagaaacggcggctacgacgtgttccactattggggccagggaaccaccgtgaccgttagctctacgcgtgcctctacaaagggaccctccgtgtttcctctggctcccagcagcaagtctacaagcggaggaacagccgctctgggctgcctggtcaaggattactttcccgagcctgtgaccgtgtcctggaatagcggagcactgacaagcggcgtgcacacctttccagccgtgctgcaaagcagcggcctgtactctctgagcagcgtggtcacagtgcctagctctagcctgggcacccagacctacatctgcaatgtgaaccacaagcctagcaacaccaaggtggacaagagagtggaacccaagagctgtgaagtgaaaaccgactccaccgaccacgtgaagcccaaagagacagagaacaccaagcagcccagcaagagctgccacaagcccaaggccatcgtgcacaccgagaaagtgaacatgatgagcctgaccgtgctgggcctgcggatgctgttcgccaaaaccgtggccgtgaacttcctgctgaccgccaagctgttcttcctc

SEQ ID NO: 7781 - DNA, 1869 bp, Artificial Sequence
  Synthetic Polynucleotide
atggccttaccagtgaccgccttgctcctgccgctggccttgctgctccacgccgccaggccgcaggccgtggttacacaagagcctagcctgacagtgtcccctggcggaacagtgaccctgacctgtagatcctctaccggcgctgtgaccaccagcaactatgccaactgggtgcagcagaagcctggacaggctcccagaggactgatcggcggcacaaacaaaagagccccttggacacccgccagattcagcggatcactgctcggaggaaaggccgctctgacactgtctggtgtccagcctgaggacgaggccgagtattattgcgccctgtggtacagcaaccacctggtgtttggcggaggcaccaagctgacagttcttctcgagggacagcctaaggccaatcctaccgtgacactgttccctccaagcagcgaagaactccaggccaacaaggccacacttgtgtgcctgatctccgacttctaccctggggctgtgacagtggcttggaaggccgatggatctcctgtgaaagccggcgtggaaaccaccaagccatccaagcagagcaacaacaaatacgccgccagctcctacctgagcctgacacctgagcagtggaagtcccacagatcctacagctgccaagtgacccacgaaggcagcaccgtggaaaagacagtggcccctacagagtgcagcggcagagccgattgcggcatcaccagcgccagctaccaccagggcgtgctgagcgccaccatcctgtacgagatcctgctgggcaaggccaccctgtacgccgtgctggtgtctgccctggtgctgatggctatggtcaagcggaaggacagccggggaagggccaagcgatctggatctggagcaacaaacttctcactactcaaacaagcaggtgacgtggaggagaatcccgggcctactagtatggactggatttggcgcatccttttccttgtcggcgctgctaccggcgcgcattccttcgaagaagttcagctggttgaatcaggcggtggcctggttcaacctggcggatctctgagactgagctgtgccgccagcggctttagcctgagcagaaattctgtgcactgggtccgacaggcccctggcaaaggacttgagtgggtcggaatgatctggggaggcggcagcaccgattacaacagcgccctgaagtcccggttcaccatcagcagagacaacagcaagaacaccctgtacctccagatgaacagcctgagagccgaggacaccgccgtgtactactgtgccagaaacggcggctacgacgtgttccactattggggccagggaaccaccgtgaccgttagctctacgcgtgcctctacaaagggaccctccgtgtttcctctggctcccagcagcaagtctacaagcggaggaacagccgctctgggctgcctggtcaaggattactttcccgagcctgtgaccgtgtcctggaatagcggagcactgacaagcggcgtgcacacctttccagccgtgctgcaaagcagcggcctgtactctctgagcagcgtggtcacagtgcctagctctagcctgggcacccagacctacatctgcaatgtgaaccacaagcctagcaacaccaaggtggacaagagagtggaacccaagagctgtatccccgaggacacattcttcccaagcagcgacgtgccctgcgacgtgaagctggtggaaaagagcttcgagacagacaccaacctgaacttccagaacctgagcgtgatcggcttcagaatcctgctgctgaaagtggccggctttaacctgctgatgaccctgcggctgtggtccagc

SEQ ID NO: 7782 - DNA, 1869 bp, Artificial Sequence
  Synthetic Polynucleotide
atggccttaccagtgaccgccttgctcctgccgctggccttgctgctccacgccgccaggccgcaggccgtggttacacaagagcctagcctgacagtgtcccctggcggaacagtgaccctgacctgtagatcctctaccggcgctgtgaccaccagcaactatgccaactgggtgcagcagaagcctggacaggctcccagaggactgatcggcggcacaaacaaaagagccccttggacacccgccagattcagcggatcactgctcggaggaaaggccgctctgacactgtctggtgtccagcctgaggacgaggccgagtattattgcgccctgtggtacagcaaccacctggtgtttggcggaggcaccaagctgacagttcttctcgagggacagcctaaggccaatcctaccgtgacactgttccctccaagcagcgaagaactccaggccaacaaggccacacttgtgtgcctgatctccgacttctaccctggggctgtgacagtggcttggaaggccgatggatctcctgtgaaagccggcgtggaaaccaccaagccatccaagcagagcaacaacaaatacgccgccagctcctacctgagcctgacacctgagcagtggaagtcccacagatcctacagctgccaagtgacccacgaaggcagcaccgtggaaaagacagtggcccctacagagtgcagcggcagagccgattgcggctttaccagcgagagctaccagcagggcgtgctgagcgccaccatcctgtacgagatcctgctgggcaaggccaccctgtacgccgtgctggtgtctgccctggtgctgatggctatggtcaagcggaaggacagccggggaagggccaagcgatctggatctggagcaacaaacttctcactactcaaacaagcaggtgacgtggaggagaatcccgggcctactagtatggactggatttggcgcatccttttccttgtcggcgctgctaccggcgcgcattccttcgaagaagttcagctggttgaatcaggcggtggcctggttcaacctggcggatctctgagactgagctgtgccgccagcggctttagcctgagcagaaattctgtgcactgggtccgacaggcccctggcaaaggacttgagtgggtcggaatgatctggggaggcggcagcaccgattacaacagcgccctgaagtcccggttcaccatcagcagagacaacagcaagaacaccctgtacctccagatgaacagcctgagagccgaggacaccgccgtgtactactgtgccagaaacggcggctacgacgtgttccactattggggccagggaaccaccgtgaccgttagctctacgcgtgcctctacaaagggaccctccgtgtttcctctggctcccagcagcaagtctacaagcggaggaacagccgctctgggctgcctggtcaaggattactttcccgagcctgtgaccgtgtcctggaatagcggagcactgacaagcggcgtgcacacctttccagccgtgctgcaaagcagcggcctgtactctctgagcagcgtggtcacagtgcctagctctagcctgggcacccagacctacatctgcaatgtgaaccacaagcctagcaacaccaaggtggacaagagagtggaacccaagagctgtatccccgaggacacattcttcccaagccccgagagcagctgcgacgtgaagctggtggaaaagagcttcgagacagacaccaacctgaacttccagaacctgagcgtgatcggcttcagaatcctgctgctgaaagtggccggctttaacctgctgatgaccctgcggctgtggtccagc

SEQ ID NO: 7783 - DNA, 1347 bp, Artificial Sequence
  Synthetic Polynucleotide
atggccttaccagtgaccgccttgctcctgccgctggccttgctgctccacgccgccaggccgcaggccgtggttacacaagagcctagcctgacagtgtcccctggcggaacagtgaccctgacctgtagatcctctaccggcgctgtgaccaccagcaactatgccaactgggtgcagcagaagcctggacaggctcccagaggactgatcggcggcacaaacaaaagagccccttggacacccgccagattcagcggatcactgctcggaggaaaggccgctctgacactgtctggtgtccagcctgaggacgaggccgagtattattgcgccctgtggtacagcaaccacctggtgtttggcggaggcaccaagctgacagttcttggcggaggcggaagtggaggcggaggatctggcggcggaggctctgaagttcagctggttgaatcaggcggtggcctggttcaacctggcggatctctgagactgagctgtgccgccagcggctttagcctgagcagaaattctgtgcactgggtccgacaggcccctggcaaaggacttgagtgggtcggaatgatctggggaggcggcagcaccgattacaacagcgccctgaagtcccggttcaccatcagcagagacaacagcaagaacaccctgtacctccagatgaacagcctgagagccgaggacaccgccgtgtactactgtgccagaaacggcggctacgacgtgttccactattggggccagggaaccaccgtgaccgttagctctacgcgtgacggtaacgaggagatgggaggaatcactcaaaccccttacaaagtctcaatttcaggaacaactgttatccttacatgtccccagtatcctggcagcgagatcctttggcagcataacgacaagaatatagggggagatgaagacgataagaatatcggatctgacgaggatcacttgagcctgaaagagttctccgagcttgaacaaagcggatattatgtgtgctatccgcgcgggtcaaagccggaagacgctaacttttacctttatctccgagccagagtgtgcgaaaattgcatggaaatggacgttatgtccgttgctacaatagttatcgtagatatatgcatcacgggtggactgcttctgctggtttattattggtccaagaatagaaaggccaaagctaaacccgtgaccagaggcgctggcgcaggcggaaggcaaaggggacaaaacaaagaacggccaccaccagtgccaaatccagattatgagcctattcggaaaggacagagggacctgtactctggcctgaatcagagaagaatc

SEQ ID NO: 7784 - DNA, 1242 bp, Artificial Sequence
  Synthetic Polynucleotide
atggccttaccagtgaccgccttgctcctgccgctggccttgctgctccacgccgccaggccgcaggccgtggttacacaagagcctagcctgacagtgtcccctggcggaacagtgaccctgacctgtagatcctctaccggcgctgtgaccaccagcaactatgccaactgggtgcagcagaagcctggacaggctcccagaggactgatcggcggcacaaacaaaagagccccttggacacccgccagattcagcggatcactgctcggaggaaaggccgctctgacactgtctggtgtccagcctgaggacgaggccgagtattattgcgccctgtggtacagcaaccacctggtgtttggcggaggcaccaagctgacagttcttggcggaggcggaagtggaggcggaggatctggcggcggaggctctgaagttcagctggttgaatcaggcggtggcctggttcaacctggcggatctctgagactgagctgtgccgccagcggctttagcctgagcagaaattctgtgcactgggtccgacaggcccctggcaaaggacttgagtgggtcggaatgatctggggaggcggcagcaccgattacaacagcgccctgaagtcccggttcaccatcagcagagacaacagcaagaacaccctgtacctccagatgaacagcctgagagccgaggacaccgccgtgtactactgtgccagaaacggcggctacgacgtgttccactattggggccagggaaccaccgtgaccgttagctctacgcgtttcaagatccccatcgaggaactggaagatcgggtgttcgtgaactgcaacacctctatcacctgggtggaaggcaccgtgggaacactgctgagcgacatcaccagactggacctcggcaagcggattctggaccctcggggcatctacagatgcaacggcaccgacatctacaaggacaaagaaagcaccgtgcaggtccactacagaatgtgccagtcctgcgtggaactggaccctgctacagtggccggcatcatcgtgaccgatgtgatcgctactctgctgctggctctgggagtgttctgcttcgccggacacgaaacaggcagactgtctggcgctgccgatacacaggccctgctgagaaacgaccaagtgtatcagcccctgcgcgacagagatgatgcccagtattctcacctcggcggcaactgggctagaaacaag

SEQ ID NO: 7785 - DNA, 1272 bp, Artificial Sequence
  Synthetic Polynucleotide
atggccttaccagtgaccgccttgctcctgccgctggccttgctgctccacgccgccaggccgcaggccgtggttacacaagagcctagcctgacagtgtcccctggcggaacagtgaccctgacctgtagatcctctaccggcgctgtgaccaccagcaactatgccaactgggtgcagcagaagcctggacaggctcccagaggactgatcggcggcacaaacaaaagagccccttggacacccgccagattcagcggatcactgctcggaggaaaggccgctctgacactgtctggtgtccagcctgaggacgaggccgagtattattgcgccctgtggtacagcaaccacctggtgtttggcggaggcaccaagctgacagttcttggcggaggcggaagtggaggcggaggatctggcggcggaggctctgaagttcagctggttgaatcaggcggtggcctggttcaacctggcggatctctgagactgagctgtgccgccagcggctttagcctgagcagaaattctgtgcactgggtccgacaggcccctggcaaaggacttgagtgggtcggaatgatctggggaggcggcagcaccgattacaacagcgccctgaagtcccggttcaccatcagcagagacaacagcaagaacaccctgtacctccagatgaacagcctgagagccgaggacaccgccgtgtactactgtgccagaaacggcggctacgacgtgttccactattggggccagggaaccaccgtgaccgttagctctacgcgtcagagcatcaagggcaaccacctggtcaaggtgtacgactaccaagaggacggcagcgtgctgctgacatgtgatgccgaggccaagaacatcacctggtttaaggacggcaagatgatcggcttcctgaccgaggacaagaagaagtggaacctgggcagcaacgctaaggaccccagaggcatgtatcagtgcaagggcagccagaacaagagcaagcccctccaggtgtactaccggatgtgccagaactgcatcgagctgaacgccgctaccatcagcggctttctgttcgccgagatcgtgtccatcttcgtgctggccgtgggcgtgtactttatcgctggacaggatggcgtgcggcagagcagagcttccgataagcaaaccctgctgcctaacgaccagctgtaccagcctctgaaggacagagaggacgaccagtacagccacctccagggcaatcagctgagaagaaac

SEQ ID NO: 7786 - DNA, 1221 bp, Artificial Sequence
  Synthetic Polynucleotide
atggccttaccagtgaccgccttgctcctgccgctggccttgctgctccacgccgccaggccgcaggccgtggttacacaagagcctagcctgacagtgtcccctggcggaacagtgaccctgacctgtagatcctctaccggcgctgtgaccaccagcaactatgccaactgggtgcagcagaagcctggacaggctcccagaggactgatcggcggcacaaacaaaagagccccttggacacccgccagattcagcggatcactgctcggaggaaaggccgctctgacactgtctggtgtccagcctgaggacgaggccgagtattattgcgccctgtggtacagcaaccacctggtgtttggcggaggcaccaagctgacagttcttggcggaggcggaagtggaggcggaggatctggcggcggaggctctgaagttcagctggttgaatcaggcggtggcctggttcaacctggcggatctctgagactgagctgtgccgccagcggctttagcctgagcagaaattctgtgcactgggtccgacaggcccctggcaaaggacttgagtgggtcggaatgatctggggaggcggcagcaccgattacaacagcgccctgaagtcccggttcaccatcagcagagacaacagcaagaacaccctgtacctccagatgaacagcctgagagccgaggacaccgccgtgtactactgtgccagaaacggcggctacgacgtgttccactattggggccagggaaccaccgtgaccgttagctctacgcgtcagagttttgggttgttggaccctaaattgtgctatctgttggacggaatcctgttcatttacggagtgatcctgaccgcattgttcctgcgggttaagttttccagatccgcagacgcacccgcttaccaacaagggcagaaccaactctacaatgaacttaatttggggcggagggaagagtacgacgttctggacaaaaggaggggacgagatcccgagatgggcggaaagcctcagcgaaggaagaatccgcaagaggggctttataacgaactccagaaagataaaatggcagaagcctatagtgagattgggatgaagggagaaaggaggaggggtaaaggtcacgatgggttgtaccaaggattgagcacagccactaaagatacctatgatgcgctccacatgcaggccctgccgccaaga

SEQ ID NO: 7787 - DNA, 1347 bp, Artificial Sequence
  Synthetic Polynucleotide
atggccttaccagtgaccgccttgctcctgccgctggccttgctgctccacgccgccaggccggaagttcagctggttgaatcaggcggtggcctggttcaacctggcggatctctgagactgagctgtgccgccagcggctttagcctgagcagaaattctgtgcactgggtccgacaggcccctggcaaaggacttgagtgggtcggaatgatctggggaggcggcagcaccgattacaacagcgccctgaagtcccggttcaccatcagcagagacaacagcaagaacaccctgtacctccagatgaacagcctgagagccgaggacaccgccgtgtactactgtgccagaaacggcggctacgacgtgttccactattggggccagggaaccaccgtgaccgttagctctggcggaggcggaagtggaggcggaggatctggcggcggaggctctcaggccgtggttacacaagagcctagcctgacagtgtcccctggcggaacagtgaccctgacctgtagatcctctaccggcgctgtgaccaccagcaactatgccaactgggtgcagcagaagcctggacaggctcccagaggactgatcggcggcacaaacaaaagagccccttggacacccgccagattcagcggatcactgctcggaggaaaggccgctctgacactgtctggtgtccagcctgaggacgaggccgagtattattgcgccctgtggtacagcaaccacctggtgtttggcggaggcaccaagctgacagttcttacgcgtgacggtaacgaggagatgggaggaatcactcaaaccccttacaaagtctcaatttcaggaacaactgttatccttacatgtccccagtatcctggcagcgagatcctttggcagcataacgacaagaatatagggggagatgaagacgataagaatatcggatctgacgaggatcacttgagcctgaaagagttctccgagcttgaacaaagcggatattatgtgtgctatccgcgcgggtcaaagccggaagacgctaacttttacctttatctccgagccagagtgtgcgaaaattgcatggaaatggacgttatgtccgttgctacaatagttatcgtagatatatgcatcacgggtggactgcttctgctggtttattattggtccaagaatagaaaggccaaagctaaacccgtgaccagaggcgctggcgcaggcggaaggcaaaggggacaaaacaaagaacggccaccaccagtgccaaatccagattatgagcctattcggaaaggacagagggacctgtactctggcctgaatcagagaagaatc

SEQ ID NO: 7788 - DNA, 1242 bp, Artificial Sequence
  Synthetic Polynucleotide
atggccttaccagtgaccgccttgctcctgccgctggccttgctgctccacgccgccaggccggaagttcagctggttgaatcaggcggtggcctggttcaacctggcggatctctgagactgagctgtgccgccagcggctttagcctgagcagaaattctgtgcactgggtccgacaggcccctggcaaaggacttgagtgggtcggaatgatctggggaggcggcagcaccgattacaacagcgccctgaagtcccggttcaccatcagcagagacaacagcaagaacaccctgtacctccagatgaacagcctgagagccgaggacaccgccgtgtactactgtgccagaaacggcggctacgacgtgttccactattggggccagggaaccaccgtgaccgttagctctggcggaggcggaagtggaggcggaggatctggcggcggaggctctcaggccgtggttacacaagagcctagcctgacagtgtcccctggcggaacagtgaccctgacctgtagatcctctaccggcgctgtgaccaccagcaactatgccaactgggtgcagcagaagcctggacaggctcccagaggactgatcggcggcacaaacaaaagagccccttggacacccgccagattcagcggatcactgctcggaggaaaggccgctctgacactgtctggtgtccagcctgaggacgaggccgagtattattgcgccctgtggtacagcaaccacctggtgtttggcggaggcaccaagctgacagttcttacgcgtttcaagatccccatcgaggaactggaagatcgggtgttcgtgaactgcaacacctctatcacctgggtggaaggcaccgtgggaacactgctgagcgacatcaccagactggacctcggcaagcggattctggaccctcggggcatctacagatgcaacggcaccgacatctacaaggacaaagaaagcaccgtgcaggtccactacagaatgtgccagtcctgcgtggaactggaccctgctacagtggccggcatcatcgtgaccgatgtgatcgctactctgctgctggctctgggagtgttctgcttcgccggacacgaaacaggcagactgtctggcgctgccgatacacaggccctgctgagaaacgaccaagtgtatcagcccctgcgcgacagagatgatgcccagtattctcacctcggcggcaactgggctagaaacaag

SEQ ID NO: 7789 - DNA, 1272 bp, Artificial Sequence
  Synthetic Polynucleotide
atggccttaccagtgaccgccttgctcctgccgctggccttgctgctccacgccgccaggccggaagttcagctggttgaatcaggcggtggcctggttcaacctggcggatctctgagactgagctgtgccgccagcggctttagcctgagcagaaattctgtgcactgggtccgacaggcccctggcaaaggacttgagtgggtcggaatgatctggggaggcggcagcaccgattacaacagcgccctgaagtcccggttcaccatcagcagagacaacagcaagaacaccctgtacctccagatgaacagcctgagagccgaggacaccgccgtgtactactgtgccagaaacggcggctacgacgtgttccactattggggccagggaaccaccgtgaccgttagctctggcggaggcggaagtggaggcggaggatctggcggcggaggctctcaggccgtggttacacaagagcctagcctgacagtgtcccctggcggaacagtgaccctgacctgtagatcctctaccggcgctgtgaccaccagcaactatgccaactgggtgcagcagaagcctggacaggctcccagaggactgatcggcggcacaaacaaaagagccccttggacacccgccagattcagcggatcactgctcggaggaaaggccgctctgacactgtctggtgtccagcctgaggacgaggccgagtattattgcgccctgtggtacagcaaccacctggtgtttggcggaggcaccaagctgacagttcttacgcgtcagagcatcaagggcaaccacctggtcaaggtgtacgactaccaagaggacggcagcgtgctgctgacatgtgatgccgaggccaagaacatcacctggtttaaggacggcaagatgatcggcttcctgaccgaggacaagaagaagtggaacctgggcagcaacgctaaggaccccagaggcatgtatcagtgcaagggcagccagaacaagagcaagcccctccaggtgtactaccggatgtgccagaactgcatcgagctgaacgccgctaccatcagcggctttctgttcgccgagatcgtgtccatcttcgtgctggccgtgggcgtgtactttatcgctggacaggatggcgtgcggcagagcagagcttccgataagcaaaccctgctgcctaacgaccagctgtaccagcctctgaaggacagagaggacgaccagtacagccacctccagggcaatcagctgagaagaaac

SEQ ID NO: 7790 - DNA, 1221 bp, Artificial Sequence
  Synthetic Polynucleotide
atggccttaccagtgaccgccttgctcctgccgctggccttgctgctccacgccgccaggccggaagttcagctggttgaatcaggcggtggcctggttcaacctggcggatctctgagactgagctgtgccgccagcggctttagcctgagcagaaattctgtgcactgggtccgacaggcccctggcaaaggacttgagtgggtcggaatgatctggggaggcggcagcaccgattacaacagcgccctgaagtcccggttcaccatcagcagagacaacagcaagaacaccctgtacctccagatgaacagcctgagagccgaggacaccgccgtgtactactgtgccagaaacggcggctacgacgtgttccactattggggccagggaaccaccgtgaccgttagctctggcggaggcggaagtggaggcggaggatctggcggcggaggctctcaggccgtggttacacaagagcctagcctgacagtgtcccctggcggaacagtgaccctgacctgtagatcctctaccggcgctgtgaccaccagcaactatgccaactgggtgcagcagaagcctggacaggctcccagaggactgatcggcggcacaaacaaaagagccccttggacacccgccagattcagcggatcactgctcggaggaaaggccgctctgacactgtctggtgtccagcctgaggacgaggccgagtattattgcgccctgtggtacagcaaccacctggtgtttggcggaggcaccaagctgacagttcttacgcgtcagagttttgggttgttggaccctaaattgtgctatctgttggacggaatcctgttcatttacggagtgatcctgaccgcattgttcctgcgggttaagttttccagatccgcagacgcacccgcttaccaacaagggcagaaccaactctacaatgaacttaatttggggcggagggaagagtacgacgttctggacaaaaggaggggacgagatcccgagatgggcggaaagcctcagcgaaggaagaatccgcaagaggggctttataacgaactccagaaagataaaatggcagaagcctatagtgagattgggatgaagggagaaaggaggaggggtaaaggtcacgatgggttgtaccaaggattgagcacagccactaaagatacctatgatgcgctccacatgcaggccctgccgccaaga

SEQ ID NO: 7791 - DNA, 2703 bp, Artificial Sequence
  Synthetic Polynucleotide
atggccttaccagtgaccgccttgctcctgccgctggccttgctgctccacgccgccaggccgcaggccgtggttacacaagagcctagcctgacagtgtcccctggcggaacagtgaccctgacctgtagatcctctaccggcgctgtgaccaccagcaactatgccaactgggtgcagcagaagcctggacaggctcccagaggactgatcggcggcacaaacaaaagagccccttggacacccgccagattcagcggatcactgctcggaggaaaggccgctctgacactgtctggtgtccagcctgaggacgaggccgagtattattgcgccctgtggtacagcaaccacctggtgtttggcggaggcaccaagctgacagttcttctcgagctgtgggtttcacagcctccagagatcagaaccctggaaggcagcagcgccttcctgccttgcagcttcaatgcctctcagggcagactggctatcggcagcgtgacctggttcagagatgaggtggtgcccggcaaagaagtgcggaacggcacccctgagtttagaggaaggctggcccctctggcctccagcagatttctgcacgatcaccaggccgagctgcacatcagagatgtgcgaggacacgacgccagcatctacgtgtgcagagtggaagtgctcggcctcggagttggcacaggcaatggaacaagactggtggtggaaaaagagcaccctcagctcggagccggaacagtgctgcttctgagagccggcttttacgccgtgtcctttctgtctgtggccgtgggcagcaccgtgtactatcagggcaagtgcctgacctggaagggacctagaaggcaactgcctgctgtggtgcctgctcctttgcctcctccatgtggaagctctgcccatctgctgccacctgttccaggcggaagggccaagcgatctggatctggagcaacaaacttctcactactcaaacaagcaggtgacgtggaggagaatcccgggcctactagtatggactggatttggcgcatccttttccttgtcggcgctgctaccggcgcgcattccttcgaagaagttcagctggttgaatcaggcggtggcctggttcaacctggcggatctctgagactgagctgtgccgccagcggctttagcctgagcagaaattctgtgcactgggtccgacaggcccctggcaaaggacttgagtgggtcggaatgatctggggaggcggcagcaccgattacaacagcgccctgaagtcccggttcaccatcagcagagacaacagcaagaacaccctgtacctccagatgaacagcctgagagccgaggacaccgccgtgtactactgtgccagaaacggcggctacgacgtgttccactattggggccagggaaccaccgtgaccgttagctctacgcgtctgtgggtgtcccagccacctgaaattcggacactggaaggctcctccgcctttctgccctgtagctttaacgccagccaggggagactcgccatcggctctgtgacatggttccgggatgaagtcgtccctggaaaagaagttcgcaacggaacaccagagttcagaggcagactcgccccactggcaagctccagattcctgcatgaccatcaggctgaactgcacattagggacgtgcggggccacgatgcctccatctatgtgtgtcgggtcgaagtgcttggactcggcgtcggaactggaaacggcactaggctggtggtcgagaaagaacatccacagcttggcgctggcaccgtcctgttgcttagagccggattctatgccgtcagcttcctgtccgtggctgtggggtctacagtgtattaccagggaaaatgtctcacctggaaaggccccagacgccagcttccagctgttgttcctgctccactgccaccaccttgtggctcctctgctcacttgcttccaccagtgcctggcggacgcgccaagagaagcggatctggcgtgaagcagaccctgaatttcgacctgctgaagctggctggcgacgtggaatccaacccaggcccttctagaggccatatgaccgagtacaagcccacggtgcgcctcgccacccgcgacgacgtccccagggccgtacgcaccctcgccgccgcgttcgccgactaccccgccacgcgccacaccgtcgatccggaccgccacatcgagcgggtcaccgagctgcaagaactcttcctcacgcgcgtcgggctcgacatcggcaaggtgtgggtcgcggacgacggcgccgcggtggcggtctggaccacgccggagagcgtcgaagcgggggcggtgttcgccgagatcggcccgcgcatggccgagttgagcggttcccggctggccgcgcagcaacagatggaaggcctcctggcgccgcaccggcccaaggagcccgcgtggttcctggccaccgtcggcgtctcgcccgaccaccagggcaagggtctgggcagcgccgtcgtgctccccggagtggaggcggccgagcgcgccggggtgcccgccttcctggagacctccgcgccccgcaacctccccttctacgagcggctcggcttcaccgtcaccgccgacgtcgaggtgcccgaaggaccgcgcacctggtgcatgacccgcaagcccggtgcctga

SEQ ID NO: 7792 - DNA, 2877 bp, Artificial Sequence
  Synthetic Polynucleotide
atggccttaccagtgaccgccttgctcctgccgctggccttgctgctccacgccgccaggccgcaggccgtggttacacaagagcctagcctgacagtgtcccctggcggaacagtgaccctgacctgtagatcctctaccggcgctgtgaccaccagcaactatgccaactgggtgcagcagaagcctggacaggctcccagaggactgatcggcggcacaaacaaaagagccccttggacacccgccagattcagcggatcactgctcggaggaaaggccgctctgacactgtctggtgtccagcctgaggacgaggccgagtattattgcgccctgtggtacagcaaccacctggtgtttggcggaggcaccaagctgacagttcttctcgagggacagcctaaggccaatcctaccgtgacactgttccctccaagcagcgaagaactccaggccaacaaggccacacttgtgtgcctgatctccgacttctaccctggggctgtgacagtggcttggaaggccgatggatctcctgtgaaagccggcgtggaaaccaccaagccatccaagcagagcaacaacaaatacgccgccagctcctacctgagcctgacacctgagcagtggaagtcccacagatcctacagctgccaagtgacccacgaaggcagcaccgtggaaaagacagtggcccctacagagtgcagcggatccattacccaaggactggctgtgcctacaatctctagcttctttccgcctggataccaagtctccttctgtcttgtgatggtcctcctgtttgctgtggacacaggactgtacttttccgtgaaaacgaacatccgcagctccacacgcgattggaaagatcacaagtttaaatggcgcaaagatccccaggacaagcgcgccaagagaagcggatctggcgtgaagcagaccctgaatttcgacctgctgaagctggctggcgacgtggaatccaacccaggccctactagtatggactggatttggcgcatccttttccttgtcggcgctgctaccggcgcgcattccttcgaagaagttcagctggttgaatcaggcggtggcctggttcaacctggcggatctctgagactgagctgtgccgccagcggctttagcctgagcagaaattctgtgcactgggtccgacaggcccctggcaaaggacttgagtgggtcggaatgatctggggaggcggcagcaccgattacaacagcgccctgaagtcccggttcaccatcagcagagacaacagcaagaacaccctgtacctccagatgaacagcctgagagccgaggacaccgccgtgtactactgtgccagaaacggcggctacgacgtgttccactattggggccagggaaccaccgtgaccgttagctctacgcgtgcctctacaaagggaccctccgtgtttcctctggctcccagcagcaagtctacaagcggaggaacagccgctctgggctgcctggtcaaggattactttcccgagcctgtgaccgtgtcctggaatagcggagcactgacaagcggcgtgcacacctttccagccgtgctgcaaagcagcggcctgtactctctgagcagcgtggtcacagtgcctagctctagcctgggcacccagacctacatctgcaatgtgaaccacaagcctagcaacaccaaggtggacaagagagtggaacccaagagctgtggtacccagagttttgggttgttggaccctaaattgtgctatctgttggacggaatcctgttcatttacggagtgatcctgaccgcattgttcctgcgggttaagttttccagatccgcagacgcacccgcttaccaacaagggcagaaccaactctacaatgaacttaatttggggcggagggaagagtacgacgttctggacaaaaggaggggacgagatcccgagatgggcggaaagcctcagcgaaggaagaatccgcaagaggggctttataacgaactccagaaagataaaatggcagaagcctatagtgagattgggatgaagggagaaaggaggaggggtaaaggtcacgatgggttgtaccaaggattgagcacagccactaaagatacctatgatgcgctccacatgcaggccctgccgccaagacgcgccaagagaagcggatctggcgtgaagcagaccctgaatttcgacctgctgaagctggctggcgacgtggaatccaacccaggcccttctagaggccatatgaccgagtacaagcccacggtgcgcctcgccacccgcgacgacgtccccagggccgtacgcaccctcgccgccgcgttcgccgactaccccgccacgcgccacaccgtcgatccggaccgccacatcgagcgggtcaccgagctgcaagaactcttcctcacgcgcgtcgggctcgacatcggcaaggtgtgggtcgcggacgacggcgccgcggtggcggtctggaccacgccggagagcgtcgaagcgggggcggtgttcgccgagatcggcccgcgcatggccgagttgagcggttcccggctggccgcgcagcaacagatggaaggcctcctggcgccgcaccggcccaaggagcccgcgtggttcctggccaccgtcggcgtctcgcccgaccaccagggcaagggtctgggcagcgccgtcgtgctccccggagtggaggcggccgagcgcgccggggtgcccgccttcctggagacctccgcgccccgcaacctccccttctacgagcggctcggcttcaccgtcaccgccgacgtcgaggtgcccgaaggaccgcgcacctggtgcatgacccgcaagcccggtgcctga

SEQ ID NO: 7793 - DNA, 2208 bp, Artificial Sequence
  Synthetic Polynucleotide
atggccttaccagtgaccgccttgctcctgccgctggccttgctgctccacgccgccaggccgcaggccgtggttacacaagagcctagcctgacagtgtcccctggcggaacagtgaccctgacctgtagatcctctaccggcgctgtgaccaccagcaactatgccaactgggtgcagcagaagcctggacaggctcccagaggactgatcggcggcacaaacaaaagagccccttggacacccgccagattcagcggatcactgctcggaggaaaggccgctctgacactgtctggtgtccagcctgaggacgaggccgagtattattgcgccctgtggtacagcaaccacctggtgtttggcggaggcaccaagctgacagttcttggcggaggcggaagtggaggcggaggatctggcggcggaggctctgaagttcagctggttgaatcaggcggtggcctggttcaacctggcggatctctgagactgagctgtgccgccagcggctttagcctgagcagaaattctgtgcactgggtccgacaggcccctggcaaaggacttgagtgggtcggaatgatctggggaggcggcagcaccgattacaacagcgccctgaagtcccggttcaccatcagcagagacaacagcaagaacaccctgtacctccagatgaacagcctgagagccgaggacaccgccgtgtactactgtgccagaaacggcggctacgacgtgttccactattggggccagggaaccaccgtgaccgttagctctacgcgtggaatgaggactgaggatcttcccaaagctgtcgtctttctcgaaccccaatggtatcgggtgctcgaaaaagactctgtgacactgaaatgccaaggggcctactctcccgaggacaactccacacagtggtttcataatgagtccctcatcagctctcaggccagctcttatttcattgatgccgctacagtggacgactccggcgagtatcggtgtcagaccaatctgtctacactgtctgaccccgtgcagcttgaggtccacattggatggttgctcttgcaagccccacgctgggttttcaaagaggaagatccaatccatctgcggtgccacagctggaaaaacaccgctctccacaaagtcacatacctgcaaaatggcaaaggacgcaaatacttccatcacaattccgatttttacattccgaaggctaccctgaaagacagcggcagctatttctgccggggactcgtcggctccaagaatgtgtcctccgaaaccgtgaatatcacgattacccaaggactggctgtgcctacaatctctagcttctttccgcctggataccaagtctccttctgtcttgtgatggtcctcctgtttgctgtggacacaggactgtacttttccgtgaaaacgaacatccgcagctccacacgcgattggaaagatcacaagtttaaatggcgcaaagatccccaggacaagcgcgccaagagaagcggatctggcgtgaagcagaccctgaatttcgacctgctgaagctggctggcgacgtggaatccaacccaggcccttctagaggccatatgaccgagtacaagcccacggtgcgcctcgccacccgcgacgacgtccccagggccgtacgcaccctcgccgccgcgttcgccgactaccccgccacgcgccacaccgtcgatccggaccgccacatcgagcgggtcaccgagctgcaagaactcttcctcacgcgcgtcgggctcgacatcggcaaggtgtgggtcgcggacgacggcgccgcggtggcggtctggaccacgccggagagcgtcgaagcgggggcggtgttcgccgagatcggcccgcgcatggccgagttgagcggttcccggctggccgcgcagcaacagatggaaggcctcctggcgccgcaccggcccaaggagcccgcgtggttcctggccaccgtcggcgtctcgcccgaccaccagggcaagggtctgggcagcgccgtcgtgctccccggagtggaggcggccgagcgcgccggggtgcccgccttcctggagacctccgcgccccgcaacctccccttctacgagcggctcggcttcaccgtcaccgccgacgtcgaggtgcccgaaggaccgcgcacctggtgcatgacccgcaagcccggtgcctga

SEQ ID NO: 7794 - DNA, 1341 bp, Artificial Sequence
  Synthetic Polynucleotide
atggccttaccagtgaccgccttgctcctgccgctggccttgctgctccacgccgccaggccgcaggccgtggttacacaagagcctagcctgacagtgtcccctggcggaacagtgaccctgacctgtagatcctctaccggcgctgtgaccaccagcaactatgccaactgggtgcagcagaagcctggacaggctcccagaggactgatcggcggcacaaacaaaagagccccttggacacccgccagattcagcggatcactgctcggaggaaaggccgctctgacactgtctggtgtccagcctgaggacgaggccgagtattattgcgccctgtggtacagcaaccacctggtgtttggcggaggcaccaagctgacagttcttggcggaggcggaagtggaggcggaggatctggcggcggaggctctgaagttcagctggttgaatcaggcggtggcctggttcaacctggcggatctctgagactgagctgtgccgccagcggctttagcctgagcagaaattctgtgcactgggtccgacaggcccctggcaaaggacttgagtgggtcggaatgatctggggaggcggcagcaccgattacaacagcgccctgaagtcccggttcaccatcagcagagacaacagcaagaacaccctgtacctccagatgaacagcctgagagccgaggacaccgccgtgtactactgtgccagaaacggcggctacgacgtgttccactattggggccagggaaccaccgtgaccgttagctctacgcgtctgtgggtgtcccagccacctgaaattcggacactggaaggctcctccgcctttctgccctgtagctttaacgccagccaggggagactcgccatcggctctgtgacatggttccgggatgaagtcgtccctggaaaagaagttcgcaacggaacaccagagttcagaggcagactcgccccactggcaagctccagattcctgcatgaccatcaggctgaactgcacattagggacgtgcggggccacgatgcctccatctatgtgtgtcgggtcgaagtgcttggactcggcgtcggaactggaaacggcactaggctggtggtcgagaaagaacatccacagcttggcgctggcaccgtcctgttgcttagagccggattctatgccgtcagcttcctgtccgtggctgtggggtctacagtgtattaccagggaaaatgtctcacctggaaaggccccagacgccagcttccagctgttgttcctgctccactgccaccaccttgtggctcctctgctcacttgcttccaccagtgcctggcgga

SEQ ID NO: 7795 - DNA, 1560 bp, Artificial Sequence
  Synthetic Polynucleotide
atggccttaccagtgaccgccttgctcctgccgctggccttgctgctccacgccgccaggccggaccaggccgtggttacacaagagcctagcctgacagtgtcccctggcggaacagtgaccctgacctgtagatcctctaccggcgctgtgaccaccagcaactatgccaactgggtgcagcagaagcctggacaggctcccagaggactgatcggcggcacaaacaaaagagccccttggacacccgccagattcagcggatcactgctcggaggaaaggccgctctgacactgtctggtgtccagcctgaggacgaggccgagtattattgcgccctgtggtacagcaaccacctggtgtttggcggaggcaccaagctgacagttcttggcggaggcggaagtggaggcggaggatctggcggcggaggctctgaagttcagctggttgaatcaggcggtggcctggttcaacctggcggatctctgagactgagctgtgccgccagcggctttagcctgagcagaaattctgtgcactgggtccgacaggcccctggcaaaggacttgagtgggtcggaatgatctggggaggcggcagcaccgattacaacagcgccctgaagtcccggttcaccatcagcagagacaacagcaagaacaccctgtacctccagatgaacagcctgagagccgaggacaccgccgtgtactactgtgccagaaacggcggctacgacgtgttccactattggggccagggaaccaccgtgaccgttagctctacgcgtcagagcaaggctcaggttctccagagtgtggcaggccagactctgactgtcagatgccagtatccaccaacaggctccctctatgagaaaaaaggatggtgtaaagaggcttctgccctcgtctgcatccggctggttacctctagcaagcccagaactatggcctggacatcccggtttacaatctgggatgaccctgatgccggatttttcacagtgacaatgacggatctgcgcgaggaagattccgggcactattggtgtagaatctacaggccctccgacaactccgtgtctaagtctgtgcgcttttacctggtcgtcagccctgccagtgcctccactcagacatcttggaccccaagggaccttgtgtcctctcagacacagacacagtcctgcgtgccaccaactgctggcgcaagacaggctccagagtctcccagcacaatccccgtcccttctcagccccagaactccacacttaggccaggaccagctgctccaatcgcactggtcccagtgttctgcggactgctggttgccaagtctctggtgctgagcgcactcctcgtttggtggggcgatatttggtggaaaacgatgatggaattgagatccctcgatacgcagaaagccacatgccaccttcagcaagtcacagacttgccttggaccagcgtcagctctcccgtggaacgggaaattctgtatcatacagtggcccgcaccaagatttccgacgatgacgacgagcacacactg

SEQ ID NO: 7796 - DNA, 1653 bp, Artificial Sequence
  Synthetic Polynucleotide
atggccttaccagtgaccgccttgctcctgccgctggccttgctgctccacgccgccaggccgcaggccgtggttacacaagagcctagcctgacagtgtcccctggcggaacagtgaccctgacctgtagatcctctaccggcgctgtgaccaccagcaactatgccaactgggtgcagcagaagcctggacaggctcccagaggactgatcggcggcacaaacaaaagagccccttggacacccgccagattcagcggatcactgctcggaggaaaggccgctctgacactgtctggtgtccagcctgaggacgaggccgagtattattgcgccctgtggtacagcaaccacctggtgtttggcggaggcaccaagctgacagttcttggcggaggcggaagtggaggcggaggatctggcggcggaggctctgaagttcagctggttgaatcaggcggtggcctggttcaacctggcggatctctgagactgagctgtgccgccagcggctttagcctgagcagaaattctgtgcactgggtccgacaggcccctggcaaaggacttgagtgggtcggaatgatctggggaggcggcagcaccgattacaacagcgccctgaagtcccggttcaccatcagcagagacaacagcaagaacaccctgtacctccagatgaacagcctgagagccgaggacaccgccgtgtactactgtgccagaaacggcggctacgacgtgttccactattggggccagggaaccaccgtgaccgttagctctacgcgtggaggctctggacaacaacagaccctgcctaaaccattcatctgggctgaaccccactttatggttccgaaagagaaacaagtcacgatttgttgccaagggaattacggggccgtcgagtatcagctccactttgagggctccctgtttgctgtggatcggcccaagccacctgaaagaatcaacaaagtccaattctatattcctgatatgaactcccgcatggcaggccagtattcatgtatctaccgcgtgggagaactttggagtgaaccctctaacctgctggacctcgtcgtgacagagatgtatgatacacccacactgtctgtgcaccctgggccagaagttatcagcggagaaaaagttaccttttattgccgcctcgataccgctacctctatgttcctcttgctgaaagagggccgcagctctcacgtgcagcgaggctacggaaaggtccaagctgagtttcctctcggccccgtgaccaccgctcacaggggcacatatagatgttttggctcttataacaatcatgcctggtcattcccatccgagcctgtgaaactgctggtcacaggcgatattgagaatacctctctggccccagaagatcctacattccccgccgacacatggggaacatatctgctgacaaccgaaaccgggctgcaaaaggaccatgctctgtgggatcataccgctcagaatctgcttcggatggggcttgcattcctggtcctggtggctcttgtctggtttctggtcgaggactggctgtcccggaagagaaccagagaaagagcttccagggccagcacctgggaaggcagacgcagactgaatactcagaccctg

SEQ ID NO: 7797 - DNA, 1854 bp, Artificial Sequence
  Synthetic Polynucleotide
atggccttaccagtgaccgccttgctcctgccgctggccttgctgctccacgccgccaggccgcaggccgtggttacacaagagcctagcctgacagtgtcccctggcggaacagtgaccctgacctgtagatcctctaccggcgctgtgaccaccagcaactatgccaactgggtgcagcagaagcctggacaggctcccagaggactgatcggcggcacaaacaaaagagccccttggacacccgccagattcagcggatcactgctcggaggaaaggccgctctgacactgtctggtgtccagcctgaggacgaggccgagtattattgcgccctgtggtacagcaaccacctggtgtttggcggaggcaccaagctgacagttcttggcggaggcggaagtggaggcggaggatctggcggcggaggctctgaagttcagctggttgaatcaggcggtggcctggttcaacctggcggatctctgagactgagctgtgccgccagcggctttagcctgagcagaaattctgtgcactgggtccgacaggcccctggcaaaggacttgagtgggtcggaatgatctggggaggcggcagcaccgattacaacagcgccctgaagtcccggttcaccatcagcagagacaacagcaagaacaccctgtacctccagatgaacagcctgagagccgaggacaccgccgtgtactactgtgccagaaacggcggctacgacgtgttccactattggggccagggaaccaccgtgaccgttagctctacgcgtaaaattgaagttatgtatcctcctccttacctagacaatgagaagagcaatggaaccattatccatgtgaaaggggcgcgtggcgatattgagaatacctctctggccccagaagatcctacattccccgccgacacatggggaacatatctgctgacaaccgaaaccgggctgcaaaaggaccatgctctgtgggatcataccgctcagaatctgcttcggatggggcttgcattcctggtcctggtggctcttgtctggtttctggtcgaggactggctgtcccggaagagaaccagagaaagagcttccagggccagcacctgggaaggcagacgcagactgaatactcagaccctgcgcgccaagagaagcggatctggcgtgaagcagaccctgaatttcgacctgctgaagctggctggcgacgtggaatccaacccaggcccttctagaggccatatgaccgagtacaagcccacggtgcgcctcgccacccgcgacgacgtccccagggccgtacgcaccctcgccgccgcgttcgccgactaccccgccacgcgccacaccgtcgatccggaccgccacatcgagcgggtcaccgagctgcaagaactcttcctcacgcgcgtcgggctcgacatcggcaaggtgtgggtcgcggacgacggcgccgcggtggcggtctggaccacgccggagagcgtcgaagcgggggcggtgttcgccgagatcggcccgcgcatggccgagttgagcggttcccggctggccgcgcagcaacagatggaaggcctcctggcgccgcaccggcccaaggagcccgcgtggttcctggccaccgtcggcgtctcgcccgaccaccagggcaagggtctgggcagcgccgtcgtgctccccggagtggaggcggccgagcgcgccggggtgcccgccttcctggagacctccgcgccccgcaacctccccttctacgagcggctcggcttcaccgtcaccgccgacgtcgaggtgcccgaaggaccgcgcacctggtgcatgacccgcaagcccggtgcctga

SEQ ID NO: 7798 - DNA, 1866 bp, Artificial Sequence
  Synthetic Polynucleotide
atggccttaccagtgaccgccttgctcctgccgctggccttgctgctccacgccgccaggccgcaggccgtggttacacaagagcctagcctgacagtgtcccctggcggaacagtgaccctgacctgtagatcctctaccggcgctgtgaccaccagcaactatgccaactgggtgcagcagaagcctggacaggctcccagaggactgatcggcggcacaaacaaaagagccccttggacacccgccagattcagcggatcactgctcggaggaaaggccgctctgacactgtctggtgtccagcctgaggacgaggccgagtattattgcgccctgtggtacagcaaccacctggtgtttggcggaggcaccaagctgacagttcttggcggaggcggaagtggaggcggaggatctggcggcggaggctctgaagttcagctggttgaatcaggcggtggcctggttcaacctggcggatctctgagactgagctgtgccgccagcggctttagcctgagcagaaattctgtgcactgggtccgacaggcccctggcaaaggacttgagtgggtcggaatgatctggggaggcggcagcaccgattacaacagcgccctgaagtcccggttcaccatcagcagagacaacagcaagaacaccctgtacctccagatgaacagcctgagagccgaggacaccgccgtgtactactgtgccagaaacggcggctacgacgtgttccactattggggccagggaaccaccgtgaccgttagctctacgcgtaaaattgaagttatgtatcctcctccttacctagacaatgagaagagcaatggaaccattatccatgtgaaaggggcgcgtgtggctgaaggcaaaacagataatcagtacacactcttcgttgccggcggaaccgtgctgctcctgctctttgtgattagcatcacaacgattatcgtcatcttcctcaaccgcaggcggagaagagagaggcgcgatctgttcaccgagtcttgggatacacagaaagctccgaacaactatcggagccctatctccaccggacagcccacaaatcagtctatggacgacacacgcgaggacatctatgtcaattaccccactttttctaggcggcctaagaccagagtgcgcgccaagagaagcggatctggcgtgaagcagaccctgaatttcgacctgctgaagctggctggcgacgtggaatccaacccaggcccttctagaggccatatgaccgagtacaagcccacggtgcgcctcgccacccgcgacgacgtccccagggccgtacgcaccctcgccgccgcgttcgccgactaccccgccacgcgccacaccgtcgatccggaccgccacatcgagcgggtcaccgagctgcaagaactcttcctcacgcgcgtcgggctcgacatcggcaaggtgtgggtcgcggacgacggcgccgcggtggcggtctggaccacgccggagagcgtcgaagcgggggcggtgttcgccgagatcggcccgcgcatggccgagttgagcggttcccggctggccgcgcagcaacagatggaaggcctcctggcgccgcaccggcccaaggagcccgcgtggttcctggccaccgtcggcgtctcgcccgaccaccagggcaagggtctgggcagcgccgtcgtgctccccggagtggaggcggccgagcgcgccggggtgcccgccttcctggagacctccgcgccccgcaacctccccttctacgagcggctcggcttcaccgtcaccgccgacgtcgaggtgcccgaaggaccgcgcacctggtgcatgacccgcaagcccggtgcctga

SEQ ID NO: 7799 - DNA, 1926 bp, Artificial Sequence
  Synthetic Polynucleotide
atggccttaccagtgaccgccttgctcctgccgctggccttgctgctccacgccgccaggccgcaggccgtggttacacaagagcctagcctgacagtgtcccctggcggaacagtgaccctgacctgtagatcctctaccggcgctgtgaccaccagcaactatgccaactgggtgcagcagaagcctggacaggctcccagaggactgatcggcggcacaaacaaaagagccccttggacacccgccagattcagcggatcactgctcggaggaaaggccgctctgacactgtctggtgtccagcctgaggacgaggccgagtattattgcgccctgtggtacagcaaccacctggtgtttggcggaggcaccaagctgacagttcttggcggaggcggaagtggaggcggaggatctggcggcggaggctctgaagttcagctggttgaatcaggcggtggcctggttcaacctggcggatctctgagactgagctgtgccgccagcggctttagcctgagcagaaattctgtgcactgggtccgacaggcccctggcaaaggacttgagtgggtcggaatgatctggggaggcggcagcaccgattacaacagcgccctgaagtcccggttcaccatcagcagagacaacagcaagaacaccctgtacctccagatgaacagcctgagagccgaggacaccgccgtgtactactgtgccagaaacggcggctacgacgtgttccactattggggccagggaaccaccgtgaccgttagctctacgcgtaaaattgaagttatgtatcctcctccttacctagacaatgagaagagcaatggaaccattatccatgtgaaaggggcgcgtggcgatattgagaatacctctctggccccagaagatcctacattccccgccgacacatggggaacatatctgctgacaaccgaaaccgggctgcaaaaggaccatgctctgtgggatcataccgctcagaatctgcttcggatggggcttgcattcctggtcctggtggctcttgtctggtttctggtcgaggactggctgtcccggaagagaaccagagaaagagcttccagggccagcacctgggaaggcagacgcagactgaatactcagaccctgcgcgccaagagaagcggatctggcgtgaagcagaccctgaatttcgacctgctgaagctggctggcgacgtggaatccaacccaggcccttctagaatgtaccggatgcagctgctgagctgtatcgccctgtctctggccctggtcacaaatagcgcccctaccagcagcagcaccaagaaaacccagctgcaactggaacacctcctgctggacctccagatgatcctgaacggcatcaacaactacaagaaccccaagctgaccgagatgctgaccgccaagttctacatgcccaagaaggccaccgagctgaagcacctccagtgcctggaagaggaactgaagcccctggaagaagtgctgaatctggcccagagcaagaacttccacctgaggccaagggacctgatctccaacatcaacgtgatcgtgctggaactgaaaggcagcgagacaaccttcatgtgcgagtacgccgacgagacagctaccatcgtggaatttctgaatcggtggatcaccttctgccagagcatcatcagcaccctgacaaagatcgaagtgatgtaccctcctccttacctggacaacgagaagtccaacggcaccatcatccacgtgaagggcaagcacctgtgtccttctccactgttccccggacctagcaagcctttctgggtgctcgttgttgttggcggcgtgctggcctgttacagcctgctggttaccgtggccttcatcatcttttgggtccgaagcaagcggagctaa

SEQ ID NO: 7800 - DNA, 1770 bp, Artificial Sequence
  Synthetic Polynucleotide
atggccttaccagtgaccgccttgctcctgccgctggccttgctgctccacgccgccaggccgcaggccgtggttacacaagagcctagcctgacagtgtcccctggcggaacagtgaccctgacctgtagatcctctaccggcgctgtgaccaccagcaactatgccaactgggtgcagcagaagcctggacaggctcccagaggactgatcggcggcacaaacaaaagagccccttggacacccgccagattcagcggatcactgctcggaggaaaggccgctctgacactgtctggtgtccagcctgaggacgaggccgagtattattgcgccctgtggtacagcaaccacctggtgtttggcggaggcaccaagctgacagttcttggcggaggcggaagtggaggcggaggatctggcggcggaggctctgaagttcagctggttgaatcaggcggtggcctggttcaacctggcggatctctgagactgagctgtgccgccagcggctttagcctgagcagaaattctgtgcactgggtccgacaggcccctggcaaaggacttgagtgggtcggaatgatctggggaggcggcagcaccgattacaacagcgccctgaagtcccggttcaccatcagcagagacaacagcaagaacaccctgtacctccagatgaacagcctgagagccgaggacaccgccgtgtactactgtgccagaaacggcggctacgacgtgttccactattggggccagggaaccaccgtgaccgttagctctacgcgtaaaattgaagttatgtatcctcctccttacctagacaatgagaagagcaatggaaccattatccatgtgaaaggggcgcgtatcacccagggcctggccgtgtctaccatcagcagctttttcccacccggctaccaggtgtccttctgcctcgtgatggtgctgctgttcgccgtggacaccggcctgtacttcagcgtgaaaacaaacatccggtccagcaccagagactggaaggaccacaagttcaagtggcggaaggacccccaggacaagcgcgccaagagaagcggatctggcgtgaagcagaccctgaatttcgacctgctgaagctggctggcgacgtggaatccaacccaggcccttctagaggccatatgaccgagtacaagcccacggtgcgcctcgccacccgcgacgacgtccccagggccgtacgcaccctcgccgccgcgttcgccgactaccccgccacgcgccacaccgtcgatccggaccgccacatcgagcgggtcaccgagctgcaagaactcttcctcacgcgcgtcgggctcgacatcggcaaggtgtgggtcgcggacgacggcgccgcggtggcggtctggaccacgccggagagcgtcgaagcgggggcggtgttcgccgagatcggcccgcgcatggccgagttgagcggttcccggctggccgcgcagcaacagatggaaggcctcctggcgccgcaccggcccaaggagcccgcgtggttcctggccaccgtcggcgtctcgcccgaccaccagggcaagggtctgggcagcgccgtcgtgctccccggagtggaggcggccgagcgcgccggggtgcccgccttcctggagacctccgcgccccgcaacctccccttctacgagcggctcggcttcaccgtcaccgccgacgtcgaggtgcccgaaggaccgcgcacctggtgcatgacccgcaagcccggtgcctga

SEQ ID NO: 7801 - DNA, 2130 bp, Artificial Sequence
  Synthetic Polynucleotide
atggccttaccagtgaccgccttgctcctgccgctggccttgctgctccacgccgccaggccgcaggccgtggttacacaagagcctagcctgacagtgtcccctggcggaacagtgaccctgacctgtagatcctctaccggcgctgtgaccaccagcaactatgccaactgggtgcagcagaagcctggacaggctcccagaggactgatcggcggcacaaacaaaagagccccttggacacccgccagattcagcggatcactgctcggaggaaaggccgctctgacactgtctggtgtccagcctgaggacgaggccgagtattattgcgccctgtggtacagcaaccacctggtgtttggcggaggcaccaagctgacagttcttggcggaggcggaagtggaggcggaggatctggcggcggaggctctgaagttcagctggttgaatcaggcggtggcctggttcaacctggcggatctctgagactgagctgtgccgccagcggctttagcctgagcagaaattctgtgcactgggtccgacaggcccctggcaaaggacttgagtgggtcggaatgatctggggaggcggcagcaccgattacaacagcgccctgaagtcccggttcaccatcagcagagacaacagcaagaacaccctgtacctccagatgaacagcctgagagccgaggacaccgccgtgtactactgtgccagaaacggcggctacgacgtgttccactattggggccagggaaccaccgtgaccgttagctctacgcgtaaaattgaagttatgtatcctcctccttacctagacaatgagaagagcaatggaaccattatccatgtgaaaggggcgcgtgacggtaacgaggagatgggaggaatcactcaaaccccttacaaagtctcaatttcaggaacaactgttatccttacatgtccccagtatcctggcagcgagatcctttggcagcataacgacaagaatatagggggagatgaagacgataagaatatcggatctgacgaggatcacttgagcctgaaagagttctccgagcttgaacaaagcggatattatgtgtgctatccgcgcgggtcaaagccggaagacgctaacttttacctttatctccgagccagagtgtgcgaaaattgcatggaaatggacgttatgtccgttgctacaatagttatcgtagatatatgcatcacgggtggactgcttctgctggtttattattggtccaagaatagaaaggccaaagctaaacccgtgaccagaggcgctggcgcaggcggaaggcaaaggggacaaaacaaagaacggccaccaccagtgccaaatccagattatgagcctattcggaaaggacagagggacctgtactctggcctgaatcagagaagaatccgcgccaagagaagcggatctggcgtgaagcagaccctgaatttcgacctgctgaagctggctggcgacgtggaatccaacccaggcccttctagagaccatatgaccgagtacaagcccacggtgcgcctcgccacccgcgacgacgtccccagggccgtacgcaccctcgccgccgcgttcgccgactaccccgccacgcgccacaccgtcgatccggaccgccacatcgagcgggtcaccgagctgcaagaactcttcctcacgcgcgtcgggctcgacatcggcaaggtgtgggtcgcggacgacggcgccgcggtggcggtctggaccacgccggagagcgtcgaagcgggggcggtgttcgccgagatcggcccgcgcatggccgagttgagcggttcccggctggccgcgcagcaacagatggaaggcctcctggcgccgcaccggcccaaggagcccgcgtggttcctggccaccgtcggcgtctcgcccgaccaccagggcaagggtctgggcagcgccgtcgtgctccccggagtggaggcggccgagcgcgccggggtgcccgccttcctggagacctccgcgccccgcaacctccccttctacgagcggctcggcttcaccgtcaccgccgacgtcgaggtgcccgaaggaccgcgcacctggtgcatgacccgcaagcccggtgcctga

SEQ ID NO: 7802 - DNA, 2115 bp, Artificial Sequence
  Synthetic Polynucleotide
atggccttaccagtgaccgccttgctcctgccgctggccttgctgctccacgccgccaggccgcaggccgtggttacacaagagcctagcctgacagtgtcccctggcggaacagtgaccctgacctgtagatcctctaccggcgctgtgaccaccagcaactatgccaactgggtgcagcagaagcctggacaggctcccagaggactgatcggcggcacaaacaaaagagccccttggacacccgccagattcagcggatcactgctcggaggaaaggccgctctgacactgtctggtgtccagcctgaggacgaggccgagtattattgcgccctgtggtacagcaaccacctggtgtttggcggaggcaccaagctgacagttcttggcggaggcggaagtggaggcggaggatctggcggcggaggctctgaagttcagctggttgaatcaggcggtggcctggttcaacctggcggatctctgagactgagctgtgccgccagcggctttagcctgagcagaaattctgtgcactgggtccgacaggcccctggcaaaggacttgagtgggtcggaatgatctggggaggcggcagcaccgattacaacagcgccctgaagtcccggttcaccatcagcagagacaacagcaagaacaccctgtacctccagatgaacagcctgagagccgaggacaccgccgtgtactactgtgccagaaacggcggctacgacgtgttccactattggggccagggaaccaccgtgaccgttagctctacgcgtaaaattgaagttatgtatcctcctccttacctagacaatgagaagagcaatggaaccattatccatgtgaaaggggcgcgtaagtctgtgcgcttttacctggtcgtcagccctgccagtgcctccactcagacatcttggaccccaagggaccttgtgtcctctcagacacagacacagtcctgcgtgccaccaactgctggcgcaagacaggctccagagtctcccagcacaatccccgtcccttctcagccccagaactccacacttaggccaggaccagctgctccaatcgcactggtcccagtgttctgcggactgctggttgccaagtctctggtgctgagcgcactcctcgtttggtggggcgatatttggtggaaaacgatgatggaattgagatccctcgatacgcagaaagccacatgccaccttcagcaagtcacagacttgccttggaccagcgtcagctctcccgtggaacgggaaattctgtatcatacagtggcccgcaccaagatttccgacgatgacgacgagcacacactgcgcgccaagagaagcggatctggcgtgaagcagaccctgaatttcgacctgctgaagctggctggcgacgtggaatccaacccaggcccttctagaatgtaccggatgcagctgctgagctgtatcgccctgtctctggccctggtcacaaatagcgcccctaccagcagcagcaccaagaaaacccagctgcaactggaacacctcctgctggacctccagatgatcctgaacggcatcaacaactacaagaaccccaagctgaccgagatgctgaccgccaagttctacatgcccaagaaggccaccgagctgaagcacctccagtgcctggaagaggaactgaagcccctggaagaagtgctgaatctggcccagagcaagaacttccacctgaggccaagggacctgatctccaacatcaacgtgatcgtgctggaactgaaaggcagcgagacaaccttcatgtgcgagtacgccgacgagacagctaccatcgtggaatttctgaatcggtggatcaccttctgccagagcatcatcagcaccctgacaaagatcgaagtgatgtaccctcctccttacctggacaacgagaagtccaacggcaccatcatccacgtgaagggcaagcacctgtgtccttctccactgttccccggacctagcaagcctttctgggtgctcgttgttgttggcggcgtgctggcctgttacagcctgctggttaccgtggccttcatcatcttttgggtccgaagcaagcggagctaa

SEQ ID NO: 7803 - DNA, 1926 bp, Artificial Sequence
  Synthetic Polynucleotide
atggccttaccagtgaccgccttgctcctgccgctggccttgctgctccacgccgccaggccgcaggccgtggttacacaagagcctagcctgacagtgtcccctggcggaacagtgaccctgacctgtagatcctctaccggcgctgtgaccaccagcaactatgccaactgggtgcagcagaagcctggacaggctcccagaggactgatcggcggcacaaacaaaagagccccttggacacccgccagattcagcggatcactgctcggaggaaaggccgctctgacactgtctggtgtccagcctgaggacgaggccgagtattattgcgccctgtggtacagcaaccacctggtgtttggcggaggcaccaagctgacagttcttggcggaggcggaagtggaggcggaggatctggcggcggaggctctgaagttcagctggttgaatcaggcggtggcctggttcaacctggcggatctctgagactgagctgtgccgccagcggctttagcctgagcagaaattctgtgcactgggtccgacaggcccctggcaaaggacttgagtgggtcggaatgatctggggaggcggcagcaccgattacaacagcgccctgaagtcccggttcaccatcagcagagacaacagcaagaacaccctgtacctccagatgaacagcctgagagccgaggacaccgccgtgtactactgtgccagaaacggcggctacgacgtgttccactattggggccagggaaccaccgtgaccgttagctctacgcgtaccacgacgccagcgccgcgaccaccaacaccggcgcccaccatcgcgtcgcagcccctgtccctgcgcccagaggcgtgccggccagcggcggggggcgcagtgcacacgagggggctggacttcgcctgtgacgcgcgtgtggctgaaggcaaaacagataatcagtacacactcttcgttgccggcggaaccgtgctgctcctgctctttgtgattagcatcacaacgattatcgtcatcttcctcaaccgcaggcggagaagagagaggcgcgatctgttcaccgagtcttgggatacacagaaagctccgaacaactatcggagccctatctccaccggacagcccacaaatcagtctatggacgacacacgcgaggacatctatgtcaattaccccactttttctaggcggcctaagaccagagtgcgcgccaagagaagcggatctggcgtgaagcagaccctgaatttcgacctgctgaagctggctggcgacgtggaatccaacccaggcccttctagaggccatatgaccgagtacaagcccacggtgcgcctcgccacccgcgacgacgtccccagggccgtacgcaccctcgccgccgcgttcgccgactaccccgccacgcgccacaccgtcgatccggaccgccacatcgagcgggtcaccgagctgcaagaactcttcctcacgcgcgtcgggctcgacatcggcaaggtgtgggtcgcggacgacggcgccgcggtggcggtctggaccacgccggagagcgtcgaagcgggggcggtgttcgccgagatcggcccgcgcatggccgagttgagcggttcccggctggccgcgcagcaacagatggaaggcctcctggcgccgcaccggcccaaggagcccgcgtggttcctggccaccgtcggcgtctcgcccgaccaccagggcaagggtctgggcagcgccgtcgtgctccccggagtggaggcggccgagcgcgccggggtgcccgccttcctggagacctccgcgccccgcaacctccccttctacgagcggctcggcttcaccgtcaccgccgacgtcgaggtgcccgaaggaccgcgcacctggtgcatgacccgcaagcccggtgcctga

SEQ ID NO: 7804 - DNA, 2103 bp, Artificial Sequence
  Synthetic Polynucleotide
atggccttaccagtgaccgccttgctcctgccgctggccttgctgctccacgccgccaggccgcaggccgtggttacacaagagcctagcctgacagtgtcccctggcggaacagtgaccctgacctgtagatcctctaccggcgctgtgaccaccagcaactatgccaactgggtgcagcagaagcctggacaggctcccagaggactgatcggcggcacaaacaaaagagccccttggacacccgccagattcagcggatcactgctcggaggaaaggccgctctgacactgtctggtgtccagcctgaggacgaggccgagtattattgcgccctgtggtacagcaaccacctggtgtttggcggaggcaccaagctgacagttcttggcggaggcggaagtggaggcggaggatctggcggcggaggctctgaagttcagctggttgaatcaggcggtggcctggttcaacctggcggatctctgagactgagctgtgccgccagcggctttagcctgagcagaaattctgtgcactgggtccgacaggcccctggcaaaggacttgagtgggtcggaatgatctggggaggcggcagcaccgattacaacagcgccctgaagtcccggttcaccatcagcagagacaacagcaagaacaccctgtacctccagatgaacagcctgagagccgaggacaccgccgtgtactactgtgccagaaacggcggctacgacgtgttccactattggggccagggaaccaccgtgaccgttagctctacgcgtaccacgacgccagcgccgcgaccaccaacaccggcgcccaccatcgcgtcgcagcccctgtccctgcgcccagaggcgtgccggccagcggcggggggcgcagtgcacacgagggggctggacttcgcctgtgacgcgcgtaagtctgtgcgcttttacctggtcgtcagccctgccagtgcctccactcagacatcttggaccccaagggaccttgtgtcctctcagacacagacacagtcctgcgtgccaccaactgctggcgcaagacaggctccagagtctcccagcacaatccccgtcccttctcagccccagaactccacacttaggccaggaccagctgctccaatcgcactggtcccagtgttctgcggactgctggttgccaagtctctggtgctgagcgcactcctcgtttggtggggcgatatttggtggaaaacgatgatggaattgagatccctcgatacgcagaaagccacatgccaccttcagcaagtcacagacttgccttggaccagcgtcagctctcccgtggaacgggaaattctgtatcatacagtggcccgcaccaagatttccgacgatgacgacgagcacacactgcgcgccaagagaagcggatctggcgtgaagcagaccctgaatttcgacctgctgaagctggctggcgacgtggaatccaacccaggcccttctagaggccatatgaccgagtacaagcccacggtgcgcctcgccacccgcgacgacgtccccagggccgtacgcaccctcgccgccgcgttcgccgactaccccgccacgcgccacaccgtcgatccggaccgccacatcgagcgggtcaccgagctgcaagaactcttcctcacgcgcgtcgggctcgacatcggcaaggtgtgggtcgcggacgacggcgccgcggtggcggtctggaccacgccggagagcgtcgaagcgggggcggtgttcgccgagatcggcccgcgcatggccgagttgagcggttcccggctggccgcgcagcaacagatggaaggcctcctggcgccgcaccggcccaaggagcccgcgtggttcctggccaccgtcggcgtctcgcccgaccaccagggcaagggtctgggcagcgccgtcgtgctccccggagtggaggcggccgagcgcgccggggtgcccgccttcctggagacctccgcgccccgcaacctccccttctacgagcggctcggcttcaccgtcaccgccgacgtcgaggtgcccgaaggaccgcgcacctggtgcatgacccgcaagcccggtgcctga

SEQ ID NO: 7805 - DNA, 1821 bp, Artificial Sequence
  Synthetic Polynucleotide
atggccttaccagtgaccgccttgctcctgccgctggccttgctgctccacgccgccaggccgcaggccgtggttacacaagagcctagcctgacagtgtcccctggcggaacagtgaccctgacctgtagatcctctaccggcgctgtgaccaccagcaactatgccaactgggtgcagcagaagcctggacaggctcccagaggactgatcggcggcacaaacaaaagagccccttggacacccgccagattcagcggatcactgctcggaggaaaggccgctctgacactgtctggtgtccagcctgaggacgaggccgagtattattgcgccctgtggtacagcaaccacctggtgtttggcggaggcaccaagctgacagttcttggcggaggcggaagtggaggcggaggatctggcggcggaggctctgaagttcagctggttgaatcaggcggtggcctggttcaacctggcggatctctgagactgagctgtgccgccagcggctttagcctgagcagaaattctgtgcactgggtccgacaggcccctggcaaaggacttgagtgggtcggaatgatctggggaggcggcagcaccgattacaacagcgccctgaagtcccggttcaccatcagcagagacaacagcaagaacaccctgtacctccagatgaacagcctgagagccgaggacaccgccgtgtactactgtgccagaaacggcggctacgacgtgttccactattggggccagggaaccaccgtgaccgttagctctacgcgtaccacgacgccagcgccgcgaccaccaacaccggcgcccaccatcgcgtcgcagcccctgtccctgcgcccagaggcgtgccggccagcggcggggggcgcagtgcacacgagggggctggacttcgcctgtgacggtaccatcactcaaggtttggcagtgtcaaccatctcatcattctttccacctggctaccaagtgtccttctgcctggtcatggtgctgctgttcgccgtggataccggcctgtacttcagcgtcaagaccaacatccggtccagcaccagagactggaaggaccacaagttcaagtggcggaaggaccctcaggacaagagggccaagcgatctggatctggagcaacaaacttctcactactcaaacaagcaggtgacgtggaggagaatcccgggccttctagaggccatatgaccgagtacaagcccacggtgcgcctcgccacccgcgacgacgtccccagggccgtacgcaccctcgccgccgcgttcgccgactaccccgccacgcgccacaccgtcgatccggaccgccacatcgagcgggtcaccgagctgcaagaactcttcctcacgcgcgtcgggctcgacatcggcaaggtgtgggtcgcggacgacggcgccgcggtggcggtctggaccacgccggagagcgtcgaagcgggggcggtgttcgccgagatcggcccgcgcatggccgagttgagcggttcccggctggccgcgcagcaacagatggaaggcctcctggcgccgcaccggcccaaggagcccgcgtggttcctggccaccgtcggcgtctcgcccgaccaccagggcaagggtctgggcagcgccgtcgtgctccccggagtggaggcggccgagcgcgccggggtgcccgccttcctggagacctccgcgccccgcaacctccccttctacgagcggctcggcttcaccgtcaccgccgacgtcgaggtgcccgaaggaccgcgcacctggtgcatgacccgcaagcccggtgcctga

SEQ ID NO: 7806 - DNA, 2199 bp, Artificial Sequence
  Synthetic Polynucleotide
atggccttaccagtgaccgccttgctcctgccgctggccttgctgctccacgccgccaggccgcaggccgtggttacacaagagcctagcctgacagtgtcccctggcggaacagtgaccctgacctgtagatcctctaccggcgctgtgaccaccagcaactatgccaactgggtgcagcagaagcctggacaggctcccagaggactgatcggcggcacaaacaaaagagccccttggacacccgccagattcagcggatcactgctcggaggaaaggccgctctgacactgtctggtgtccagcctgaggacgaggccgagtattattgcgccctgtggtacagcaaccacctggtgtttggcggaggcaccaagctgacagttcttggcggaggcggaagtggaggcggaggatctggcggcggaggctctgaagttcagctggttgaatcaggcggtggcctggttcaacctggcggatctctgagactgagctgtgccgccagcggctttagcctgagcagaaattctgtgcactgggtccgacaggcccctggcaaaggacttgagtgggtcggaatgatctggggaggcggcagcaccgattacaacagcgccctgaagtcccggttcaccatcagcagagacaacagcaagaacaccctgtacctccagatgaacagcctgagagccgaggacaccgccgtgtactactgtgccagaaacggcggctacgacgtgttccactattggggccagggaaccaccgtgaccgttagctctacgcgtaccacgacgccagcgccgcgaccaccaacaccggcgcccaccatcgcgtcgcagcccctgtccctgcgcccagaggcgtgccggccagcggcggggggcgcagtgcacacgagggggctggacttcgcctgtgacggtaccacaacgccgggcgaaaggagttccttgccggccttttaccccggcacaagcggaagctgtagtgggtgtggaagcctcagcctcccacttcttgcgggcctcgtcgcggcagatgcagtagcttcacttcttattgtaggcgcggtatttctctgtgctcgaccaaggaggtcacccgctcaggaggatggtaaggtgtatataaatatgccaggacgcggaagctctagacgggttaagttttccagatccgcagacgcacccgcttaccaacaagggcagaaccaactctacaatgaacttaatttggggcggagggaagagtacgacgttctggacaaaaggaggggacgagatcccgagatgggcggaaagcctcagcgaaggaagaatccgcaagaggggctttataacgaactccagaaagataaaatggcagaagcctatagtgagattgggatgaagggagaaaggaggaggggtaaaggtcacgatgggttgtaccaaggattgagcacagccactaaagatacctatgatgcgctccacatgcaggccctgccgccaagacgcgccaagagaagcggatctggcgtgaagcagaccctgaatttcgacctgctgaagctggctggcgacgtggaatccaacccaggccctggccatatgaccgagtacaagcccacggtgcgcctcgccacccgcgacgacgtccccagggccgtacgcaccctcgccgccgcgttcgccgactaccccgccacgcgccacaccgtcgatccggaccgccacatcgagcgggtcaccgagctgcaagaactcttcctcacgcgcgtcgggctcgacatcggcaaggtgtgggtcgcggacgacggcgccgcggtggcggtctggaccacgccggagagcgtcgaagcgggggcggtgttcgccgagatcggcccgcgcatggccgagttgagcggttcccggctggccgcgcagcaacagatggaaggcctcctggcgccgcaccggcccaaggagcccgcgtggttcctggccaccgtcggcgtctcgcccgaccaccagggcaagggtctgggcagcgccgtcgtgctccccggagtggaggcggccgagcgcgccggggtgcccgccttcctggagacctccgcgccccgcaacctccccttctacgagcggctcggcttcaccgtcaccgccgacgtcgaggtgcccgaaggaccgcgcacctggtgcatgacccgcaagcccggtgcctga

SEQ ID NO: 7807 - DNA, 1914 bp, Artificial Sequence
  Synthetic Polynucleotide
atggccttaccagtgaccgccttgctcctgccgctggccttgctgctccacgccgccaggccgcaggccgtggttacacaagagcctagcctgacagtgtcccctggcggaacagtgaccctgacctgtagatcctctaccggcgctgtgaccaccagcaactatgccaactgggtgcagcagaagcctggacaggctcccagaggactgatcggcggcacaaacaaaagagccccttggacacccgccagattcagcggatcactgctcggaggaaaggccgctctgacactgtctggtgtccagcctgaggacgaggccgagtattattgcgccctgtggtacagcaaccacctggtgtttggcggaggcaccaagctgacagttcttggcggaggcggaagtggaggcggaggatctggcggcggaggctctgaagttcagctggttgaatcaggcggtggcctggttcaacctggcggatctctgagactgagctgtgccgccagcggctttagcctgagcagaaattctgtgcactgggtccgacaggcccctggcaaaggacttgagtgggtcggaatgatctggggaggcggcagcaccgattacaacagcgccctgaagtcccggttcaccatcagcagagacaacagcaagaacaccctgtacctccagatgaacagcctgagagccgaggacaccgccgtgtactactgtgccagaaacggcggctacgacgtgttccactattggggccagggaaccaccgtgaccgttagctctacgcgtaccacgacgccagcgccgcgaccaccaacaccggcgcccaccatcgcgtcgcagcccctgtccctgcgcccagaggcgtgccggccagcggcggggggcgcagtgcacacgagggggctggacttcgcctgtgacgcgcgtggcgatattgagaatacctctctggccccagaagatcctacattccccgccgacacatggggaacatatctgctgacaaccgaaaccgggctgcaaaaggaccatgctctgtgggatcataccgctcagaatctgcttcggatggggcttgcattcctggtcctggtggctcttgtctggtttctggtcgaggactggctgtcccggaagagaaccagagaaagagcttccagggccagcacctgggaaggcagacgcagactgaatactcagaccctgcgcgccaagagaagcggatctggcgtgaagcagaccctgaatttcgacctgctgaagctggctggcgacgtggaatccaacccaggcccttctagaggccatatgaccgagtacaagcccacggtgcgcctcgccacccgcgacgacgtccccagggccgtacgcaccctcgccgccgcgttcgccgactaccccgccacgcgccacaccgtcgatccggaccgccacatcgagcgggtcaccgagctgcaagaactcttcctcacgcgcgtcgggctcgacatcggcaaggtgtgggtcgcggacgacggcgccgcggtggcggtctggaccacgccggagagcgtcgaagcgggggcggtgttcgccgagatcggcccgcgcatggccgagttgagcggttcccggctggccgcgcagcaacagatggaaggcctcctggcgccgcaccggcccaaggagcccgcgtggttcctggccaccgtcggcgtctcgcccgaccaccagggcaagggtctgggcagcgccgtcgtgctccccggagtggaggcggccgagcgcgccggggtgcccgccttcctggagacctccgcgccccgcaacctccccttctacgagcggctcggcttcaccgtcaccgccgacgtcgaggtgcccgaaggaccgcgcacctggtgcatgacccgcaagcccggtgcctga

SEQ ID NO: 7808 - DNA, 2337 bp, Artificial Sequence
  Synthetic Polynucleotide
atggccttaccagtgaccgccttgctcctgccgctggccttgctgctccacgccgccaggccgcaggccgtggttacacaagagcctagcctgacagtgtcccctggcggaacagtgaccctgacctgtagatcctctaccggcgctgtgaccaccagcaactatgccaactgggtgcagcagaagcctggacaggctcccagaggactgatcggcggcacaaacaaaagagccccttggacacccgccagattcagcggatcactgctcggaggaaaggccgctctgacactgtctggtgtccagcctgaggacgaggccgagtattattgcgccctgtggtacagcaaccacctggtgtttggcggaggcaccaagctgacagttcttggcggaggcggaagtggaggcggaggatctggcggcggaggctctgaagttcagctggttgaatcaggcggtggcctggttcaacctggcggatctctgagactgagctgtgccgccagcggctttagcctgagcagaaattctgtgcactgggtccgacaggcccctggcaaaggacttgagtgggtcggaatgatctggggaggcggcagcaccgattacaacagcgccctgaagtcccggttcaccatcagcagagacaacagcaagaacaccctgtacctccagatgaacagcctgagagccgaggacaccgccgtgtactactgtgccagaaacggcggctacgacgtgttccactattggggccagggaaccaccgtgaccgttagctctacgcgtcagagcaaggctcaggttctccagagtgtggcaggccagactctgactgtcagatgccagtatccaccaacaggctccctctatgagaaaaaaggatggtgtaaagaggcttctgccctcgtctgcatccggctggttacctctagcaagcccagaactatggcctggacatcccggtttacaatctgggatgaccctgatgccggatttttcacagtgacaatgacggatctgcgcgaggaagattccgggcactattggtgtagaatctacaggccctccgacaactccgtgtctaagtctgtgcgcttttacctggtcgtcagccctgccagtgcctccactcagacatcttggaccccaagggaccttgtgtcctctcagacacagacacagtcctgcgtgccaccaactgctggcgcaagacaggctccagagtctcccagcacaatccccgtcccttctcagccccagaactccacacttaggccaggaccagctgctccaatcgcactggtcccagtgttctgcggactgctggttgccaagtctctggtgctgagcgcactcctcgtttggtggggcgatatttggtggaaaacgatgatggaattgagatccctcgatacgcagaaagccacatgccaccttcagcaagtcacagacttgccttggaccagcgtcagctctcccgtggaacgggaaattctgtatcatacagtggcccgcaccaagatttccgacgatgacgacgagcacacactgcgcgccaagagaagcggatctggcgtgaagcagaccctgaatttcgacctgctgaagctggctggcgacgtggaatccaacccaggcccttctagaatgtaccggatgcagctgctgagctgtatcgccctgtctctggccctggtcacaaatagcgcccctaccagcagcagcaccaagaaaacccagctgcaactggaacacctcctgctggacctccagatgatcctgaacggcatcaacaactacaagaaccccaagctgacccggatgctgaccttcaagttctacatgcccaagaaggccaccgagctgaagcacctccagtgcctggaagaggaactgaagcccctggaagaagtgctgaatctggcccagagcaagaacttccacctgaggccaagggacctgatctccaacatcaacgtgatcgtgctggaactgaaaggcagcgagacaaccttcatgtgcgagtacgccgacgagacagctaccatcgtggaatttctgaatcggtggatcaccttctgccagagcatcatcagcaccctgacagcgcgtaaaattgaagttatgtatcctcctccttacctagacaatgagaagagcaatggaaccattatccatgtgaaagggaaacacctttgtccaagtcccctatttcccggaccttctaagcccttttgggtgctggtggtggttgggggagtcctggcttgctatagcttgctagtaacagtggcctttattattttctgggtgaggagtaagaggagctaa

SEQ ID NO: 7809 - skipped

SEQ ID NO: 7810 - protein, 233 aa, Artificial Sequence
  Synthetic Polypeptide
MYRMQLLSCIALSLALVTNSAPTSSSTKKTQLQLEHLLLDLQMILNGINNYKNPKLTRMLTFKFYMPKKATELKHLQCLEEELKPLEEVLNLAQSKNFHLRPRDLISNINVIVLELKGSETTFMCEYADETATIVEFLNRWITFCQSIISTLTHMLQMAGQCSQNEYFDSLLHACIPCQLRCSSNTPPLTCQRYCNASVTNSVKGTNAILWTCLGLSLIISLAVFVLMFLLRK

SEQ ID NO: 7811 - protein, 97 aa, Artificial Sequence
  Synthetic Polypeptide
MDWIWRILFLVGAATGAHSLQMAGQCSQNEYFDSLLHACIPCQLRCSSNTPPLTCQRYCNASVTNSVKGTNAILWTCLGLSLIISLAVFVLMFLLRK

SEQ ID NO: 7812 - protein, 376 aa, Artificial Sequence
  Synthetic Polypeptide
MASYPCHQHASAFDQAARSRGHSNRRTALRPRRQQEATEVRLEQKMPTLLRVYIDGPHGMGKTTTTQLLVALGSRDDIVYVPEPMTYWQVLGASETIANIYTTQHRLDQGEISAGDAAVVMTSAQITMGMPYAVTDAVLAPHVGGEAGSSHAPPPALTLIFDRHPIAALLCYPAARYLMGSMTPQAVLAFVALIPPTLPGTNIVLGALPEDRHIDRLAKRQRPGERLDLAMLAAIRRVYGLLANTVRYLQGGGSWWEDWGQLSGTAVPPQGAEPQSNAGPRPHIGDTLFTLFRAPELLAPNGDLYNVFAWALDVLAKRLRPMHVFILDYDQSPAGCRDALLQLTSGMVQTHVTTPGSIPTICDLARTFAREMGEAN

SEQ ID NO: 7813 - protein, 310 aa, Artificial Sequence
  Synthetic Polypeptide
MALPRRPPTLTRVYLDGPFGIGKTSILNAMPDHTPDGAPILKVYEPMKYWRCQSTDLVVAANETPERRRGGALSRFQSDMIMASIQARFADPYLLFHERLSSKCRGKIEICDTPAIILMLDRHPVAAILCFPITRYLLGEYSLEMLISSIIRLPLESPGCNLTVTILPDEKEHVNRICSRDRPGETADRNMLRTLNAVYASLVDTVKYANLTCPYEKESWEMEWLGLPWFEESLLEEFISRPRPVICSRTRMPLDRTLLAIFKRKELCSENGELLTQYSWILWGLLTKLHTINVELFDISGMSRRECATL

SEQ ID NO: 7814 - protein, 355 aa, Artificial Sequence
  Synthetic Polypeptide
MGSSKSKPKDPSQRASRILWHEMWHEGLEEASRLYFGERNVKGMFEVLEPLHAMMERGPQTLKETSFNQAYGRDLMEAQEWCRKYMKSGNVKDLLQAWDLYYHVFRRISKLEYSGGGSLEGVQVETISPGDGRTFPKRGQTCVVHYTGMLEDGKKFDSSRDRNKPFKFMLGKQEVIRGWEEGVAQMSVGQRAKLTISPDYAYGATGHPGIIPPHATLVFDVELLKLESGGGGSGGGGSGGGGSGHMDPFLVLLHSVSSSLSSSELTELKFLCLGRVGKRKLERVQSGLDLFSMLLEQNDLEPGHTELLRELLASLRRHDLLRRVDDFEAGAAAGAAPGEEDLCAAFNVICDNVGK

SEQ ID NO: 7815 - protein, 14 aa, Artificial Sequence
  Synthetic Polypeptide
MGSSKSKPKDPSQR

SEQ ID NO: 7816 - protein, 109 aa, Artificial Sequence
  Synthetic Polypeptide
DPFLVLLHSVSSSLSSSELTELKFLCLGRVGKRKLERVQSGLDLFSMLLEQNDLEPGHTELLRELLASLRRHDLLRRVDDFEAGAAAGAAPGEEDLCAAFNVICDNVGK

SEQ ID NO: 7817 - protein, 233 aa, Artificial Sequence
  Synthetic Polypeptide
MDNQGVIYSDLNLPPNPKRQQRKPKGNKSSILATEQEITYAELNLQKASQDFQGNDKTYHCKDLPSAPEKLIVGILGIICLILMASVVTIVVIPSTLIQRHNNSSLNTRTQKARHCGHCPEEWITYSNSCYYIGKERRTWEESLLACTSKNSSLLSIDNEEEMKFLSIISPSSWIGVFRNSSHHPWVTMNGLAFKHEIKDSDNAELNCAVLQVNRLKSAQCGSSIIYHCKHKL

SEQ ID NO: 7818 - protein, 179 aa, Artificial Sequence
  Synthetic Polypeptide
MAVFKTTLWRLISGTLGIICLSLMSTLGILLKNSFTKLSIEPAFTPGPNIELQKDSDCCSCQEKWVGYRCNCYFISSEQKTWNESRHLCASQKSSLLQLQNTDELDFMSSSQQFYWIGLSYSEEHTAWLWENGSALSQYLFPSFETFNTKNCIAYNPNGNALDESCEDKNRYICKQQLI

SEQ ID NO: 7819 - protein, 231 aa, Artificial Sequence
  Synthetic Polypeptide
MSKQRGTFSEVSLAQDPKRQQRKPKGNKSSISGTEQEIFQVELNLQNPSLNHQGIDKIYDCQGLLPPPEKLTAEVLGIICIVLMATVLKTIVLIPFLEQNNSSPNTRTQKARHCGHCPEEWITYSNSCYYIGKERRTWEESLLACTSKNSSLLSIDNEEEMKFLASILPSSWIGVFRNSSHHPWVTINGLAFKHKIKDSDNAELNCAVLQVNRLKSAQCGSSMIYHCKHKL

SEQ ID NO: 7820 - protein, 231 aa, Artificial Sequence; identical to SEQ ID NO: 7819
  Synthetic Polypeptide

SEQ ID NO: 7821 - protein, 257 aa, Artificial Sequence
  Synthetic Polypeptide
MNKQRGTFSEVSLAQDPKPQQRKPKGNKSSISGTEQEIFQVELNLQNASLNHQGIDKIYDCQGLLPPPEKLTAEVLGIICIVLMATVLKTIVLIPFLEQNNSSPNTRTQKARPCGHCPEEWITYSNSCYYIGKERRTWEESLQACASKNSSSLLSIDNEEEMKFLASILPSSWIGVFRNSSHHPWVTINGLAFKHEIKDSDHAERNCAMLHVRGLISDQCGSSRIIVSISFRIKALELAVHQIKFYICSNRNDIMIA

SEQ ID NO: 7822 - protein, 257 aa, Artificial Sequence; identical to SEQ ID NO: 7821
  Synthetic Polypeptide

SEQ ID NO: 7823 - protein, 72 aa, Artificial Sequence
  Synthetic Polypeptide
KIEVMYPPPYLDNEKSNGTIIHVKGKHLCPSPLFPGPSKPFWVLVVVGGVLACYSLLVTVAFIIFWVRSKRS

SEQ ID NO: 7824 - protein, 25 aa, Artificial Sequence
  Synthetic Polypeptide
KIEVMYPPPYLDNEKSNGTIIHVKG

SEQ ID NO: 7825 - protein, 227 aa, Artificial Sequence
  Synthetic Polypeptide
MYRMQLLSCIALSLALVTNSAPTSSSTKKTQLQLEHLLLDLQMILNGINNYKNPKLTRMLTFKFYMPKKATELKHLQCLEEELKPLEEVLNLAQSKNFHLRPRDLISNINVIVLELKGSETTFMCEYADETATIVEFLNRWITFCQSIISTLTTRAKPTTTPAPRPPTPAPTIASQPLSLRPEACRPAAGGAVHTRGLDFACDIYIWAPLAGTCGVLLLSLVITLYC

SEQ ID NO: 7826 - protein, 225 aa, Artificial Sequence
  Synthetic Polypeptide
MYRMQLLSCIALSLALVTNSAPTSSSTKKTQLQLEHLLLDLQMILNGINNYKNPKLTAMLTKKFYMPKKATELKHLQCLEEELKPLEEVLNLAQSKNFHLRPRDLISNINVIVLELKGSETTFMCEYADETATIVEFLNRWITFCASIISTLTKIEVMYPPPYLDNEKSNGTIIHVKGKHLCPSPLFPGPSKPFWVLVVVGGVLACYSLLVTVAFIIFWVRSKRS

SEQ ID NO: 7827 - protein, 225 aa, Artificial Sequence
  Synthetic Polypeptide
MYRMQLLSCIALSLALVTNSAPTSSSTKKTQLQLEHLLLDLQMILNGINNYKNPKLTEMLTAKFYMPKKATELKHLQCLEEELKPLEEVLNLAQSKNFHLRPRDLISNINVIVLELKGSETTFMCEYADETATIVEFLNRWITFCQSIISTLTKIEVMYPPPYLDNEKSNGTIIHVKGKHLCPSPLFPGPSKPFWVLVVVGGVLACYSLLVTVAFIIFWVRSKRS

SEQ ID NO: 7828 - protein, 225 aa, Artificial Sequence
  Synthetic Polypeptide
MYRMQLLSCIALSLALVTNSAPTSSSTKKTQLQLEHLLLDLQMILNGINNYKNPKLTEMLTAKFYMPKKATELKHLQCLEEELKPLEEVLNLAQSKNFHLRPRDLISNINVAVLELKGSETTFMCEYADETATIVEFLNRWITFCQSIISTLTKIEVMYPPPYLDNEKSNGTIIHVKGKHLCPSPLFPGPSKPFWVLVVVGGVLACYSLLVTVAFIIFWVRSKRS

SEQ ID NO: 7829 - protein, 225 aa, Artificial Sequence
  Synthetic Polypeptide
MYRMQLLSCIALSLALVTNSAPASSSTKKTQLQLEHLLLDLQMILNGINNYKNPKLTRMLTAKFAMPKKATELKHLQCLEEELKPLEEVLNGAQSKNFHLRPRDLISNINVIVLELKGSETTFMCEYADETATIVEFLNRWITFGQSIISTLTKIEVMYPPPYLDNEKSNGTIIHVKGKHLCPSPLFPGPSKPFWVLVVVGGVLACYSLLVTVAFIIFWVRSKRS

SEQ ID NO: 7830 - protein, 206 aa, Artificial Sequence
  Synthetic Polypeptide
MYRMQLLSCIALSLALVTNSNWVNVISDLKKIEDLIQSMHIDATLYTESDVHPSCKVTAMKCFLLELQVISLESGDASIHDTVKNLIILANNSLSSNGNVTESGCKECEELEEKNIKEFLQSFVHIVQMFINTSKIEVMYPPPYLDNEKSNGTIIHVKGKHLCPSPLFPGPSKPFWVLVVVGGVLACYSLLVTVAFIIFWVRSKRS

SEQ ID NO: 7831 - protein, 206 aa, Artificial Sequence
  Synthetic Polypeptide
MYRMQLLSCIALSLALVTNSNWVNVISSLKKIEDLIQSMHIDATLYTESDVHPSCKVTAMKCFLLELQVISLESGDASIHDTVENLIILANNSLSSNGNVTESGCKECEELEEKNIKEFLQSFVHIVQMFINTSKIEVMYPPPYLDNEKSNGTIIHVKGKHLCPSPLFPGPSKPFWVLVVVGGVLACYSLLVTVAFIIFWVRSKRS

SEQ ID NO: 7832 - protein, 206 aa, Artificial Sequence
  Synthetic Polypeptide
MYRMQLLSCIALSLALVTNSNWVNVISDLKKIEDLIQSMHIDATLYTESDVHPSCKVTAMKCFLLELQVISLESGDASIHDTVENLIIRANNSLSSNGNVTESGCKECEELEEKNIKEFLQSFVHIVQMFINTSKIEVMYPPPYLDNEKSNGTIIHVKGKHLCPSPLFPGPSKPFWVLVVVGGVLACYSLLVTVAFIIFWVRSKRS

SEQ ID NO: 7833 - protein, 153 aa, Artificial Sequence
  Synthetic Polypeptide
MYRMQLLSCIALSLALVTNSAPTSSSTKKTQLQLEHLLLDLQMILNGINNYKNPKLTRMLTFKFYMPKKATELKHLQCLEEELKPLEEVLNLAQSKNFHLRPRDLISNINVIVLELKGSETTFMCEYADETATIVEFLNRWITFCQSIISTLT

SEQ ID NO: 7834 - protein, 153 aa, Artificial Sequence
  Synthetic Polypeptide
MYRMQLLSCIALSLALVTNSAPTSSSTKKTQLQLEHLLLDLQMILNGINNYKNPKLTAMLTKKFYMPKKATELKHLQCLEEELKPLEEVLNLAQSKNFHLRPRDLISNINVIVLELKGSETTFMCEYADETATIVEFLNRWITFCASIISTLT

SEQ ID NO: 7835 - protein, 153 aa, Artificial Sequence
  Synthetic Polypeptide
MYRMQLLSCIALSLALVTNSAPTSSSTKKTQLQLEHLLLDLQMILNGINNYKNPKLTEMLTAKFYMPKKATELKHLQCLEEELKPLEEVLNLAQSKNFHLRPRDLISNINVIVLELKGSETTFMCEYADETATIVEFLNRWITFCQSIISTLT

SEQ ID NO: 7836 - protein, 153 aa, Artificial Sequence
  Synthetic Polypeptide
MYRMQLLSCIALSLALVTNSAPTSSSTKKTQLQLEHLLLDLQMILNGINNYKNPKLTEMLTAKFYMPKKATELKHLQCLEEELKPLEEVLNLAQSKNFHLRPRDLISNINVAVLELKGSETTFMCEYADETATIVEFLNRWITFCQSIISTLT

SEQ ID NO: 7837 - protein, 153 aa, Artificial Sequence
  Synthetic Polypeptide
MYRMQLLSCIALSLALVTNSAPASSSTKKTQLQLEHLLLDLQMILNGINNYKNPKLTRMLTAKFAMPKKATELKHLQCLEEELKPLEEVLNGAQSKNFHLRPRDLISNINVIVLELKGSETTFMCEYADETATIVEFLNRWITFGQSIISTLT

SEQ ID NO: 7838 - protein, 162 aa, Artificial Sequence
  Synthetic Polypeptide
MRISKPHLRSISIQCYLCLLLNSHFLTEAGIHVFILGCFSAGLPKTEANWVNVISDLKKIEDLIQSMHIDATLYTESDVHPSCKVTAMKCFLLELQVISLESGDASIHDTVENLIILANNSLSSNGNVTESGCKECEELEEKNIKEFLQSFVHIVQMFINTS

SEQ ID NO: 7839 - protein, 134 aa, Artificial Sequence
  Synthetic Polypeptide
MYRMQLLSCIALSLALVTNSNWVNVISDLKKIEDLIQSMHIDATLYTESDVHPSCKVTAMKCFLLELQVISLESGDASIHDTVKNLIILANNSLSSNGNVTESGCKECEELEEKNIKEFLQSFVHIVQMFINTS

SEQ ID NO: 7840 - protein, 134 aa, Artificial Sequence
  Synthetic Polypeptide
MYRMQLLSCIALSLALVTNSNWVNVISSLKKIEDLIQSMHIDATLYTESDVHPSCKVTAMKCFLLELQVISLESGDASIHDTVENLIILANNSLSSNGNVTESGCKECEELEEKNIKEFLQSFVHIVQMFINTS

SEQ ID NO: 7841 - protein, 134 aa, Artificial Sequence
  Synthetic Polypeptide
MYRMQLLSCIALSLALVTNSNWVNVISDLKKIEDLIQSMHIDATLYTESDVHPSCKVTAMKCFLLELQVISLESGDASIHDTVENLIIRANNSLSSNGNVTESGCKECEELEEKNIKEFLQSFVHIVQMFINTS

SEQ ID NO: 7842 - protein, 178 aa, Artificial Sequence
  Synthetic Polypeptide
MALPVTALLLPLALLLHAARPYFGKLESKLSVIRNLNDQVLFIDQGNRPLFEDMTDSDCRDNAPRTIFIISMYKDSQPRGMAVTISVKCEKISTLSCENKIISFKEMNPPDNIKDTKSDIIFFQRSVPGHDNKMQFESSSYEGYFLACEKERDLFKLILKKEDELGDRSIMFTVQNED

SEQ ID NO: 7843 - protein, 233 aa, Artificial Sequence; identical to SEQ ID NO: 7810
  Synthetic Polypeptide

SEQ ID NO: 7844 - protein, 233 aa, Artificial Sequence
  Synthetic Polypeptide
MYRMQLLSCIALSLALVTNSAPTSSSTKKTQLQLEHLLLDLQMILNGINNYKNPKLTAMLTKKFYMPKKATELKHLQCLEEELKPLEEVLNLAQSKNFHLRPRDLISNINVIVLELKGSETTFMCEYADETATIVEFLNRWITFCASIISTLTHMLQMAGQCSQNEYFDSLLHACIPCQLRCSSNTPPLTCQRYCNASVTNSVKGTNAILWTCLGLSLIISLAVFVLMFLLRK

SEQ ID NO: 7845 - protein, 233 aa, Artificial Sequence
  Synthetic Polypeptide
MYRMQLLSCIALSLALVTNSAPTSSSTKKTQLQLEHLLLDLQMILNGINNYKNPKLTEMLTAKFYMPKKATELKHLQCLEEELKPLEEVLNLAQSKNFHLRPRDLISNINVIVLELKGSETTFMCEYADETATIVEFLNRWITFCQSIISTLTHMLQMAGQCSQNEYFDSLLHACIPCQLRCSSNTPPLTCQRYCNASVTNSVKGTNAILWTCLGLSLIISLAVFVLMFLLRK

SEQ ID NO: 7846 - protein, 233 aa, Artificial Sequence
  Synthetic Polypeptide
MYRMQLLSCIALSLALVTNSAPTSSSTKKTQLQLEHLLLDLQMILNGINNYKNPKLTEMLTAKFYMPKKATELKHLQCLEEELKPLEEVLNLAQSKNFHLRPRDLISNINVAVLELKGSETTFMCEYADETATIVEFLNRWITFCQSIISTLTHMLQMAGQCSQNEYFDSLLHACIPCQLRCSSNTPPLTCQRYCNASVTNSVKGTNAILWTCLGLSLIISLAVFVLMFLLRK

SEQ ID NO: 7847 - protein, 233 aa, Artificial Sequence
  Synthetic Polypeptide
MYRMQLLSCIALSLALVTNSAPASSSTKKTQLQLEHLLLDLQMILNGINNYKNPKLTRMLTAKFAMPKKATELKHLQCLEEELKPLEEVLNGAQSKNFHLRPRDLISNINVIVLELKGSETTFMCEYADETATIVEFLNRWITFGQSIISTLTHMLQMAGQCSQNEYFDSLLHACIPCQLRCSSNTPPLTCQRYCNASVTNSVKGTNAILWTCLGLSLIISLAVFVLMFLLRK

SEQ ID NO: 7848 - protein, 242 aa, Artificial Sequence
  Synthetic Polypeptide
MRISKPHLRSISIQCYLCLLLNSHFLTEAGIHVFILGCFSAGLPKTEANWVNVISDLKKIEDLIQSMHIDATLYTESDVHPSCKVTAMKCFLLELQVISLESGDASIHDTVENLIILANNSLSSNGNVTESGCKECEELEEKNIKEFLQSFVHIVQMFINTSHMLQMAGQCSQNEYFDSLLHACIPCQLRCSSNTPPLTCQRYCNASVTNSVKGTNAILWTCLGLSLIISLAVFVLMFLLRK

SEQ ID NO: 7849 - protein, 242 aa, Artificial Sequence
  Synthetic Polypeptide
MRISKPHLRSISIQCYLCLLLNSHFLTEAGIHVFILGCFSAGLPKTEANWVNVISDLKKIEDLIQSMHIDATLYTESDVHPSCKVTAMKCFLLELQVISLESGDASIHDTVKNLIILANNSLSSNGNVTESGCKECEELEEKNIKEFLQSFVHIVQMFINTSHMLQMAGQCSQNEYFDSLLHACIPCQLRCSSNTPPLTCQRYCNASVTNSVKGTNAILWTCLGLSLIISLAVFVLMFLLRK

SEQ ID NO: 7850 - protein, 547 aa, Artificial Sequence
  Synthetic Polypeptide
MYRMQLLSCIALSLALVTNSAPTSSSTKKTQLQLEHLLLDLQMILNGINNYKNPKLTRMLTFKFYMPKKATELKHLQCLEEELKPLEEVLNLAQSKNFHLRPRDLISNINVIVLELKGSETTFMCEYADETATIVEFLNRWITFCQSIISTLTHMFPQDRPFEDTCHGNPSHYYDKAVRRCCYRCPMGLFPTQQCPQRPTDCRKQCEPDYYLDEADRCTACVTCSRDDLVEKTPCAWNSSRVCECRPGMFCSTSAVNSCARCFFHSVCPAGMIVKFPGTAQKNTVCEPASPGVSPACASPENCKEPSSGTIPQAKPTPVSPATSSASTMPVRGGTRLAQEAASKLTRAPDSPSSVGRPSSDPGLSPTQPCPEGSGDCRKQCEPDYYLDEAGRCTACVSCSRDDLVEKTPCAWNSSRTCECRPGMICATSATNSCARCVPYPICAAETVTKPQDMAEKDTTFEAPPLGTQPDCNPTPENGEAPASTSPTQSLLVDSQASKTLPIPTSAPVALSSTGKPVLDAGPVLFWVILVLVVVVGSSAFLLCHRR

SEQ ID NO: 7851 - protein, 231 aa, Artificial Sequence
  Synthetic Polypeptide
MQDEERYMTLNVQSKKRSSAQTSQLTFKDYSVTLHWYKILLGISGTVNGILTLTLISLILLVSQGVLLKCQKGSCSNATQYEDTGDLKVNNGTRRNISNKDLCASRSADQTVLCQSEWLKYQGKCYWFSNEMKSWSDSYVYCLERKSHLLIIHDQLEMAFIQKNLRQLNYVWIGLNFTSLKMTWTWVDGSPIDSKIFFIKGPAKENSCAAIKESKIFSETCSSVFKWICQY

SEQ ID NO: 7852 - protein, 642 aa, Artificial Sequence
  Synthetic Polypeptide
MDWIWRILFLVGAATGAHSGPEVQLVESGGGLVQAGGSLRLSCAASGRTFSMGWFRQAPGKEREFVAAITYSGGSPYYADSVKGRFTISRDNAKNTVYLQMNSLKPEDTAVYYCAANPTYGSDWNAENWGQGTQVTVSSGSGGGGSGGGGSGGGGSFEDIQMTQSPSSLSASVGDRVTITCKASDHINNWLAWYQQKPGQAPKLLIYGATTLETGVPSRFSGSGSGTDYTLTISSLQPEDFATYYCQQSWNTPWTFGQGTKLEIKRGGGGSGGGGSGGGGSQVQLQQPGAELVKPGASVKMSCKASGYAFSSYWINWMKQKPGQGLEWIGQIYPGDGDTNYNGKFKGRATLTADTSSSTAYMQLSSLTSEDSAVYFCARSITTVVGCAMDYWGQGTSVTVSSTRGMRTEDLPKAVVFLEPQWYRVLEKDSVTLKCQGAYSPEDNSTQWFHNESLISSQASSYFIDAATVDDSGEYRCQTNLSTLSDPVQLEVHIGWLLLQAPRWVFKEEDPIHLRCHSWKNTALHKVTYLQNGKGRKYFHHNSDFYIPKATLKDSGSYFCRGLVGSKNVSSETVNITITQGLAVPTISSFFPPGYQVSFCLVMVLLFAVDTGLYFSVKTNIRSSTRDWKDHKFKWRKDPQDK

SEQ ID NO: 7853 - protein, 587 aa, Artificial Sequence
  Synthetic Polypeptide
MDWIWRILFLVGAATGAHSGPEVQLVESGGGLVQAGGSLRLSCAASGRTFSMGWFRQAPGKEREFVAAITYSGGSPYYADSVKGRFTISRDNAKNTVYLQMNSLKPEDTAVYYCAANPTYGSDWNAENWGQGTQVTVSSGSGGGGSGGGGSGGGGSFEDIQMTQSPSSLSASVGDRVTITCKASDHINNWLAWYQQKPGQAPKLLIYGATTLETGVPSRFSGSGSGTDYTLTISSLQPEDFATYYCQQSWNTPWTFGQGTKLEIKRGGGGSGGGGSGGGGSQVQLQQPGAELVKPGASVKMSCKASGYAFSSYWINWMKQKPGQGLEWIGQIYPGDGDTNYNGKFKGRATLTADTSSSTAYMQLSSLTSEDSAVYFCARSITTVVGCAMDYWGQGTSVTVSSTRLWVSQPPEIRTLEGSSAFLPCSFNASQGRLAIGSVTWFRDEVVPGKEVRNGTPEFRGRLAPLASSRFLHDHQAELHIRDVRGHDASIYVCRVEVLGLGVGTGNGTRLVVEKEHPQLGAGTVLLLRAGFYAVSFLSVAVGSTVYYQGKCLTWKGPRRQLPAVVPAPLPPPCGSSAHLLPPVPGG

SEQ ID NO: 7854 - protein, 659 aa, Artificial Sequence
  Synthetic Polypeptide
MDWIWRILFLVGAATGAHSGPEVQLVESGGGLVQAGGSLRLSCAASGRTFSMGWFRQAPGKEREFVAAITYSGGSPYYADSVKGRFTISRDNAKNTVYLQMNSLKPEDTAVYYCAANPTYGSDWNAENWGQGTQVTVSSGSGGGGSGGGGSGGGGSFEDIQMTQSPSSLSASVGDRVTITCKASDHINNWLAWYQQKPGQAPKLLIYGATTLETGVPSRFSGSGSGTDYTLTISSLQPEDFATYYCQQSWNTPWTFGQGTKLEIKRGGGGSGGGGSGGGGSQVQLQQPGAELVKPGASVKMSCKASGYAFSSYWINWMKQKPGQGLEWIGQIYPGDGDTNYNGKFKGRATLTADTSSSTAYMQLSSLTSEDSAVYFCARSITTVVGCAMDYWGQGTSVTVSSTRQSKAQVLQSVAGQTLTVRCQYPPTGSLYEKKGWCKEASALVCIRLVTSSKPRTMAWTSRFTIWDDPDAGFFTVTMTDLREEDSGHYWCRIYRPSDNSVSKSVRFYLVVSPASASTQTSWTPRDLVSSQTQTQSCVPPTAGARQAPESPSTIPVPSQPQNSTLRPGPAAPIALVPVFCGLLVAKSLVLSALLVWWGDIWWKTMMELRSLDTQKATCHLQQVTDLPWTSVSSPVEREILYHTVARTKISDDDDEHTL

SEQ ID NO: 7855 - protein, 687 aa, Artificial Sequence
  Synthetic Polypeptide
MDWIWRILFLVGAATGAHSGPEVQLVESGGGLVQAGGSLRLSCAASGRTFSMGWFRQAPGKEREFVAAITYSGGSPYYADSVKGRFTISRDNAKNTVYLQMNSLKPEDTAVYYCAANPTYGSDWNAENWGQGTQVTVSSGSGGGGSGGGGSGGGGSFEDIQMTQSPSSLSASVGDRVTITCKASDHINNWLAWYQQKPGQAPKLLIYGATTLETGVPSRFSGSGSGTDYTLTISSLQPEDFATYYCQQSWNTPWTFGQGTKLEIKRGGGGSGGGGSGGGGSQVQLQQPGAELVKPGASVKMSCKASGYAFSSYWINWMKQKPGQGLEWIGQIYPGDGDTNYNGKFKGRATLTADTSSSTAYMQLSSLTSEDSAVYFCARSITTVVGCAMDYWGQGTSVTVSSTRQQQTLPKPFIWAEPHFMVPKEKQVTICCQGNYGAVEYQLHFEGSLFAVDRPKPPERINKVQFYIPDMNSRMAGQYSCIYRVGELWSEPSNLLDLVVTEMYDTPTLSVHPGPEVISGEKVTFYCRLDTATSMFLLLKEGRSSHVQRGYGKVQAEFPLGPVTTAHRGTYRCFGSYNNHAWSFPSEPVKLLVTGDIENTSLAPEDPTFPADTWGTYLLTTETGLQKDHALWDHTAQNLLRMGLAFLVLVALVWFLVEDWLSRKRTRERASRASTWEGRRRLNTQTL

SEQ ID NO: 7856 - protein, 496 aa, Artificial Sequence
  Synthetic Polypeptide
MDWIWRILFLVGAATGAHSGPEVQLVESGGGLVQAGGSLRLSCAASGRTFSMGWFRQAPGKEREFVAAITYSGGSPYYADSVKGRFTISRDNAKNTVYLQMNSLKPEDTAVYYCAANPTYGSDWNAENWGQGTQVTVSSGSGGGGSGGGGSGGGGSFEDIQMTQSPSSLSASVGDRVTITCKASDHINNWLAWYQQKPGQAPKLLIYGATTLETGVPSRFSGSGSGTDYTLTISSLQPEDFATYYCQQSWNTPWTFGQGTKLEIKRGGGGSGGGGSGGGGSQVQLQQPGAELVKPGASVKMSCKASGYAFSSYWINWMKQKPGQGLEWIGQIYPGDGDTNYNGKFKGRATLTADTSSSTAYMQLSSLTSEDSAVYFCARSITTVVGCAMDYWGQGTSVTVSSTRKIEVMYPPPYLDNEKSNGTIIHVKGTRITQGLAVPTISSFFPPGYQVSFCLVMVLLFAVDTGLYFSVKTNIRSSTRDWKDHKFKWRKDPQDK

SEQ ID NO: 7857 - protein, 506 aa, Artificial Sequence
  Synthetic Polypeptide
MDWIWRILFLVGAATGAHSGPEVQLVESGGGLVQAGGSLRLSCAASGRTFSMGWFRQAPGKEREFVAAITYSGGSPYYADSVKGRFTISRDNAKNTVYLQMNSLKPEDTAVYYCAANPTYGSDWNAENWGQGTQVTVSSGSGGGGSGGGGSGGGGSFEDIQMTQSPSSLSASVGDRVTITCKASDHINNWLAWYQQKPGQAPKLLIYGATTLETGVPSRFSGSGSGTDYTLTISSLQPEDFATYYCQQSWNTPWTFGQGTKLEIKRGGGGSGGGGSGGGGSQVQLQQPGAELVKPGASVKMSCKASGYAFSSYWINWMKQKPGQGLEWIGQIYPGDGDTNYNGKFKGRATLTADTSSSTAYMQLSSLTSEDSAVYFCARSITTVVGCAMDYWGQGTSVTVSSTRKIEVMYPPPYLDNEKSNGTIIHVKGTRVEKEHPQLGAGTVLLLRAGFYAVSFLSVAVGSTVYYQGKCLTWKGPRRQLPAVVPAPLPPPCGSSAHLLPPVPGG

SEQ ID NO: 7858 - protein, 587 aa, Artificial Sequence
  Synthetic Polypeptide
MDWIWRILFLVGAATGAHSGPEVQLVESGGGLVQAGGSLRLSCAASGRTFSMGWFRQAPGKEREFVAAITYSGGSPYYADSVKGRFTISRDNAKNTVYLQMNSLKPEDTAVYYCAANPTYGSDWNAENWGQGTQVTVSSGSGGGGSGGGGSGGGGSFEDIQMTQSPSSLSASVGDRVTITCKASDHINNWLAWYQQKPGQAPKLLIYGATTLETGVPSRFSGSGSGTDYTLTISSLQPEDFATYYCQQSWNTPWTFGQGTKLEIKRGGGGSGGGGSGGGGSQVQLQQPGAELVKPGASVKMSCKASGYAFSSYWINWMKQKPGQGLEWIGQIYPGDGDTNYNGKFKGRATLTADTSSSTAYMQLSSLTSEDSAVYFCARSITTVVGCAMDYWGQGTSVTVSSTRKIEVMYPPPYLDNEKSNGTIIHVKGTRKSVRFYLVVSPASASTQTSWTPRDLVSSQTQTQSCVPPTAGARQAPESPSTIPVPSQPQNSTLRPGPAAPIALVPVFCGLLVAKSLVLSALLVWWGDIWWKTMMELRSLDTQKATCHLQQVTDLPWTSVSSPVEREILYHTVARTKISDDDDEHTL

SEQ ID NO: 7859 - protein, 524 aa, Artificial Sequence
  Synthetic Polypeptide
MDWIWRILFLVGAATGAHSGPEVQLVESGGGLVQAGGSLRLSCAASGRTFSMGWFRQAPGKEREFVAAITYSGGSPYYADSVKGRFTISRDNAKNTVYLQMNSLKPEDTAVYYCAANPTYGSDWNAENWGQGTQVTVSSGSGGGGSGGGGSGGGGSFEDIQMTQSPSSLSASVGDRVTITCKASDHINNWLAWYQQKPGQAPKLLIYGATTLETGVPSRFSGSGSGTDYTLTISSLQPEDFATYYCQQSWNTPWTFGQGTKLEIKRGGGGSGGGGSGGGGSQVQLQQPGAELVKPGASVKMSCKASGYAFSSYWINWMKQKPGQGLEWIGQIYPGDGDTNYNGKFKGRATLTADTSSSTAYMQLSSLTSEDSAVYFCARSITTVVGCAMDYWGQGTSVTVSSTRKIEVMYPPPYLDNEKSNGTIIHVKGTRGDIENTSLAPEDPTFPADTWGTYLLTTETGLQKDHALWDHTAQNLLRMGLAFLVLVALVWFLVEDWLSRKRTRERASRASTWEGRRRLNTQTL

SEQ ID NO: 7860 - protein, 505 aa, Artificial Sequence
  Synthetic Polypeptide
MDWIWRILFLVGAATGAHSGPEVQLVESGGGLVQAGGSLRLSCAASGRTFSMGWFRQAPGKEREFVAAITYSGGSPYYADSVKGRFTISRDNAKNTVYLQMNSLKPEDTAVYYCAANPTYGSDWNAENWGQGTQVTVSSGSGGGGSGGGGSGGGGSFEDIQMTQSPSSLSASVGDRVTITCKASDHINNWLAWYQQKPGQAPKLLIYGATTLETGVPSRFSGSGSGTDYTLTISSLQPEDFATYYCQQSWNTPWTFGQGTKLEIKRGGGGSGGGGSGGGGSQVQLQQPGAELVKPGASVKMSCKASGYAFSSYWINWMKQKPGQGLEWIGQIYPGDGDTNYNGKFKGRATLTADTSSSTAYMQLSSLTSEDSAVYFCARSITTVVGCAMDYWGQGTSVTVSSTRKIEVMYPPPYLDNEKSNGTIIHVKGTRTTPGERSSLPAFYPGTSGSCSGCGSLSLPLLAGLVAADAVASLLIVGAVFLCARPRRSPAQEDGKVYINMPGRG

SEQ ID NO: 7861 - protein, 574 aa, Artificial Sequence
  Synthetic Polypeptide
MDWIWRILFLVGAATGAHSGPEVQLVESGGGLVQAGGSLRLSCAASGRTFSMGWFRQAPGKEREFVAAITYSGGSPYYADSVKGRFTISRDNAKNTVYLQMNSLKPEDTAVYYCAANPTYGSDWNAENWGQGTQVTVSSGSGGGGSGGGGSGGGGSFEDIQMTQSPSSLSASVGDRVTITCKASDHINNWLAWYQQKPGQAPKLLIYGATTLETGVPSRFSGSGSGTDYTLTISSLQPEDFATYYCQQSWNTPWTFGQGTKLEIKRGGGGSGGGGSGGGGSQVQLQQPGAELVKPGASVKMSCKASGYAFSSYWINWMKQKPGQGLEWIGQIYPGDGDTNYNGKFKGRATLTADTSSSTAYMQLSSLTSEDSAVYFCARSITTVVGCAMDYWGQGTSVTVSSTRKIEVMYPPPYLDNEKSNGTIIHVKGTRQSFGLLDPKLCYLLDGILFIYGVILTALFLRVKFSRSADAPAYQQGQNQLYNELNLGRREEYDVLDKRRGRDPEMGGKPQRRKNPQEGLYNELQKDKMAEAYSEIGMKGERRRGKGHDGLYQGLSTATKDTYDALHMQALPPR

SEQ ID NO: 7862 - protein, 528 aa, Artificial Sequence
  Synthetic Polypeptide
MDWIWRILFLVGAATGAHSGPEVQLVESGGGLVQAGGSLRLSCAASGRTFSMGWFRQAPGKEREFVAAITYSGGSPYYADSVKGRFTISRDNAKNTVYLQMNSLKPEDTAVYYCAANPTYGSDWNAENWGQGTQVTVSSGSGGGGSGGGGSGGGGSFEDIQMTQSPSSLSASVGDRVTITCKASDHINNWLAWYQQKPGQAPKLLIYGATTLETGVPSRFSGSGSGTDYTLTISSLQPEDFATYYCQQSWNTPWTFGQGTKLEIKRGGGGSGGGGSGGGGSQVQLQQPGAELVKPGASVKMSCKASGYAFSSYWINWMKQKPGQGLEWIGQIYPGDGDTNYNGKFKGRATLTADTSSSTAYMQLSSLTSEDSAVYFCARSITTVVGCAMDYWGQGTSVTVSSTRKIEVMYPPPYLDNEKSNGTIIHVKGTRVAEGKTDNQYTLFVAGGTVLLLLFVISITTIIVIFLNRRRRRERRDLFTESWDTQKAPNNYRSPISTGQPTNQSMDDTREDIYVNYPTFSRRPKTRV

SEQ ID NO: 7863 - protein, 140 aa, Artificial Sequence; identical to SEQ ID NO: 3441
  Synthetic Polypeptide

SEQ ID NO: 7864 - protein, 139 aa, Artificial Sequence
  Synthetic Polypeptide
QNPDPAVYQLRDSKSSDKSVCLFTDFDSQTNVSQSKDSDVYITDKCVLDMRSMDFKSNSAVAWSNKSDFACANAFNNSIIPEDTFFPSPESSCDVKLVEKSFETDTNLNFQNLSVIGFRILLLKVAGFNLLMTLRLWSS

SEQ ID NO: 7865 - protein, 138 aa, Artificial Sequence
  Synthetic Polypeptide
NPDPAVYQLRDSKSSDKSVCLFTDFDSQTNVSQSKDSDVYITDKCVLDMRSMDFKSNSAVAWSNKSDFACANAFNNSIIPEDTFFPSPESSCDVKLVEKSFETDTNLNFQNLSVIGFRILLLKVAGFNLLMTLRLWSS

SEQ ID NO: 7866 - protein, 137 aa, Artificial Sequence; identical to SEQ ID NO: 3442
  Synthetic Polypeptide

SEQ ID NO: 7867 - protein, 136 aa, Artificial Sequence; identical to SEQ ID NO: 3497
  Synthetic Polypeptide

SEQ ID NO: 7868 - protein, 135 aa, Artificial Sequence
  Synthetic Polypeptide
PAVYQLRDSKSSDKSVCLFTDFDSQTNVSQSKDSDVYITDKCVLDMRSMDFKSNSAVAWSNKSDFACANAFNNSIIPEDTFFPSPESSCDVKLVEKSFETDTNLNFQNLSVIGFRILLLKVAGFNLLMTLRLWSS

SEQ ID NO: 7869 - protein, 134 aa, Artificial Sequence; identical to SEQ ID NO: 3498
  Synthetic Polypeptide

SEQ ID NO: 7870 - protein, 133 aa, Artificial Sequence
  Synthetic Polypeptide
VYQLRDSKSSDKSVCLFTDFDSQTNVSQSKDSDVYITDKCVLDMRSMDFKSNSAVAWSNKSDFACANAFNNSIIPEDTFFPSPESSCDVKLVEKSFETDTNLNFQNLSVIGFRILLLKVAGFNLLMTLRLWSS

SEQ ID NO: 7871 - protein, 132 aa, Artificial Sequence
  Synthetic Polypeptide
YQLRDSKSSDKSVCLFTDFDSQTNVSQSKDSDVYITDKCVLDMRSMDFKSNSAVAWSNKSDFACANAFNNSIIPEDTFFPSPESSCDVKLVEKSFETDTNLNFQNLSVIGFRILLLKVAGFNLLMTLRLWSS

SEQ ID NO: 7872 - protein, 131 aa, Artificial Sequence
  Synthetic Polypeptide
QLRDSKSSDKSVCLFTDFDSQTNVSQSKDSDVYITDKCVLDMRSMDFKSNSAVAWSNKSDFACANAFNNSIIPEDTFFPSPESSCDVKLVEKSFETDTNLNFQNLSVIGFRILLLKVAGFNLLMTLRLWSS

SEQ ID NO: 7873 - protein, 130 aa, Artificial Sequence; identical to SEQ ID NO: 3499
  Synthetic Polypeptide

SEQ ID NO: 7874 - protein, 129 aa, Artificial Sequence
  Synthetic Polypeptide
RDSKSSDKSVCLFTDFDSQTNVSQSKDSDVYITDKCVLDMRSMDFKSNSAVAWSNKSDFACANAFNNSIIPEDTFFPSPESSCDVKLVEKSFETDTNLNFQNLSVIGFRILLLKVAGFNLLMTLRLWSS

SEQ ID NO: 7875 - protein, 128 aa, Artificial Sequence
  Synthetic Polypeptide
DSKSSDKSVCLFTDFDSQTNVSQSKDSDVYITDKCVLDMRSMDFKSNSAVAWSNKSDFACANAFNNSIIPEDTFFPSPESSCDVKLVEKSFETDTNLNFQNLSVIGFRILLLKVAGFNLLMTLRLWSS

SEQ ID NO: 7876 - protein, 127 aa, Artificial Sequence; identical to SEQ ID NO: 3500
  Synthetic Polypeptide

SEQ ID NO: 7877 - protein, 126 aa, Artificial Sequence
  Synthetic Polypeptide
KSSDKSVCLFTDFDSQTNVSQSKDSDVYITDKCVLDMRSMDFKSNSAVAWSNKSDFACANAFNNSIIPEDTFFPSPESSCDVKLVEKSFETDTNLNFQNLSVIGFRILLLKVAGFNLLMTLRLWSS

SEQ ID NO: 7878 - protein, 125 aa, Artificial Sequence
  Synthetic Polypeptide
SSDKSVCLFTDFDSQTNVSQSKDSDVYITDKCVLDMRSMDFKSNSAVAWSNKSDFACANAFNNSIIPEDTFFPSPESSCDVKLVEKSFETDTNLNFQNLSVIGFRILLLKVAGFNLLMTLRLWSS

SEQ ID NO: 7879 - protein, 124 aa, Artificial Sequence
  Synthetic Polypeptide
SDKSVCLFTDFDSQTNVSQSKDSDVYITDKCVLDMRSMDFKSNSAVAWSNKSDFACANAFNNSIIPEDTFFPSPESSCDVKLVEKSFETDTNLNFQNLSVIGFRILLLKVAGFNLLMTLRLWSS

SEQ ID NO: 7880 - protein, 123 aa, Artificial Sequence; identical to SEQ ID NO: 3501
  Synthetic Polypeptide

SEQ ID NO: 7881 - protein, 122 aa, Artificial Sequence
  Synthetic Polypeptide
KSVCLFTDFDSQTNVSQSKDSDVYITDKCVLDMRSMDFKSNSAVAWSNKSDFACANAFNNSIIPEDTFFPSPESSCDVKLVEKSFETDTNLNFQNLSVIGFRILLLKVAGFNLLMTLRLWSS

SEQ ID NO: 7882 - protein, 121 aa, Artificial Sequence
  Synthetic Polypeptide
SVCLFTDFDSQTNVSQSKDSDVYITDKCVLDMRSMDFKSNSAVAWSNKSDFACANAFNNSIIPEDTFFPSPESSCDVKLVEKSFETDTNLNFQNLSVIGFRILLLKVAGFNLLMTLRLWSS

SEQ ID NO: 7883 - protein, 120 aa, Artificial Sequence
  Synthetic Polypeptide
VCLFTDFDSQTNVSQSKDSDVYITDKCVLDMRSMDFKSNSAVAWSNKSDFACANAFNNSIIPEDTFFPSPESSCDVKLVEKSFETDTNLNFQNLSVIGFRILLLKVAGFNLLMTLRLWSS

SEQ ID NO: 7884 - protein, 119 aa, Artificial Sequence
  Synthetic Polypeptide
CLFTDFDSQTNVSQSKDSDVYITDKCVLDMRSMDFKSNSAVAWSNKSDFACANAFNNSIIPEDTFFPSPESSCDVKLVEKSFETDTNLNFQNLSVIGFRILLLKVAGFNLLMTLRLWSS

SEQ ID NO: 7885 - protein, 118 aa, Artificial Sequence
  Synthetic Polypeptide
LFTDFDSQTNVSQSKDSDVYITDKCVLDMRSMDFKSNSAVAWSNKSDFACANAFNNSIIPEDTFFPSPESSCDVKLVEKSFETDTNLNFQNLSVIGFRILLLKVAGFNLLMTLRLWSS

SEQ ID NO: 7886 - protein, 117 aa, Artificial Sequence
  Synthetic Polypeptide
FTDFDSQTNVSQSKDSDVYITDKCVLDMRSMDFKSNSAVAWSNKSDFACANAFNNSIIPEDTFFPSPESSCDVKLVEKSFETDTNLNFQNLSVIGFRILLLKVAGFNLLMTLRLWSS

SEQ ID NO: 7887 - protein, 116 aa, Artificial Sequence
  Synthetic Polypeptide
TDFDSQTNVSQSKDSDVYITDKCVLDMRSMDFKSNSAVAWSNKSDFACANAFNNSIIPEDTFFPSPESSCDVKLVEKSFETDTNLNFQNLSVIGFRILLLKVAGFNLLMTLRLWSS

SEQ ID NO: 7888 - protein, 115 aa, Artificial Sequence
  Synthetic Polypeptide
DFDSQTNVSQSKDSDVYITDKCVLDMRSMDFKSNSAVAWSNKSDFACANAFNNSIIPEDTFFPSPESSCDVKLVEKSFETDTNLNFQNLSVIGFRILLLKVAGFNLLMTLRLWSS

SEQ ID NO: 7889 - protein, 114 aa, Artificial Sequence; identical to SEQ ID NO: 3502
  Synthetic Polypeptide

SEQ ID NO: 7890 - protein, 113 aa, Artificial Sequence
  Synthetic Polypeptide
DSQTNVSQSKDSDVYITDKCVLDMRSMDFKSNSAVAWSNKSDFACANAFNNSIIPEDTFFPSPESSCDVKLVEKSFETDTNLNFQNLSVIGFRILLLKVAGFNLLMTLRLWSS

SEQ ID NO: 7891 - protein, 112 aa, Artificial Sequence
  Synthetic Polypeptide
SQTNVSQSKDSDVYITDKCVLDMRSMDFKSNSAVAWSNKSDFACANAFNNSIIPEDTFFPSPESSCDVKLVEKSFETDTNLNFQNLSVIGFRILLLKVAGFNLLMTLRLWSS

SEQ ID NO: 7892 - protein, 111 aa, Artificial Sequence
  Synthetic Polypeptide
QTNVSQSKDSDVYITDKCVLDMRSMDFKSNSAVAWSNKSDFACANAFNNSIIPEDTFFPSPESSCDVKLVEKSFETDTNLNFQNLSVIGFRILLLKVAGFNLLMTLRLWSS

SEQ ID NO: 7893 - protein, 110 aa, Artificial Sequence
  Synthetic Polypeptide
TNVSQSKDSDVYITDKCVLDMRSMDFKSNSAVAWSNKSDFACANAFNNSIIPEDTFFPSPESSCDVKLVEKSFETDTNLNFQNLSVIGFRILLLKVAGFNLLMTLRLWSS

SEQ ID NO: 7894 - protein, 109 aa, Artificial Sequence
  Synthetic Polypeptide
NVSQSKDSDVYITDKCVLDMRSMDFKSNSAVAWSNKSDFACANAFNNSIIPEDTFFPSPESSCDVKLVEKSFETDTNLNFQNLSVIGFRILLLKVAGFNLLMTLRLWSS

SEQ ID NO: 7895 - protein, 108 aa, Artificial Sequence; identical to SEQ ID NO: 3503
  Synthetic Polypeptide

SEQ ID NO: 7896 - protein, 107 aa, Artificial Sequence
  Synthetic Polypeptide
SQSKDSDVYITDKCVLDMRSMDFKSNSAVAWSNKSDFACANAFNNSIIPEDTFFPSPESSCDVKLVEKSFETDTNLNFQNLSVIGFRILLLKVAGFNLLMTLRLWSS

SEQ ID NO: 7897 - protein, 106 aa, Artificial Sequence
  Synthetic Polypeptide
QSKDSDVYITDKCVLDMRSMDFKSNSAVAWSNKSDFACANAFNNSIIPEDTFFPSPESSCDVKLVEKSFETDTNLNFQNLSVIGFRILLLKVAGFNLLMTLRLWSS

SEQ ID NO: 7898 - protein, 105 aa, Artificial Sequence
  Synthetic Polypeptide
SKDSDVYITDKCVLDMRSMDFKSNSAVAWSNKSDFACANAFNNSIIPEDTFFPSPESSCDVKLVEKSFETDTNLNFQNLSVIGFRILLLKVAGFNLLMTLRLWSS

SEQ ID NO: 7899 - protein, 104 aa, Artificial Sequence
  Synthetic Polypeptide
KDSDVYITDKCVLDMRSMDFKSNSAVAWSNKSDFACANAFNNSIIPEDTFFPSPESSCDVKLVEKSFETDTNLNFQNLSVIGFRILLLKVAGFNLLMTLRLWSS

SEQ ID NO: 7900 - protein, 103 aa, Artificial Sequence
  Synthetic Polypeptide
DSDVYITDKCVLDMRSMDFKSNSAVAWSNKSDFACANAFNNSIIPEDTFFPSPESSCDVKLVEKSFETDTNLNFQNLSVIGFRILLLKVAGFNLLMTLRLWSS

SEQ ID NO: 7901 - protein, 102 aa, Artificial Sequence
  Synthetic Polypeptide
SDVYITDKCVLDMRSMDFKSNSAVAWSNKSDFACANAFNNSIIPEDTFFPSPESSCDVKLVEKSFETDTNLNFQNLSVIGFRILLLKVAGFNLLMTLRLWSS

SEQ ID NO: 7902 - protein, 101 aa, Artificial Sequence
  Synthetic Polypeptide
DVYITDKCVLDMRSMDFKSNSAVAWSNKSDFACANAFNNSIIPEDTFFPSPESSCDVKLVEKSFETDTNLNFQNLSVIGFRILLLKVAGFNLLMTLRLWSS

SEQ ID NO: 7903 - protein, 100 aa, Artificial Sequence
  Synthetic Polypeptide
VYITDKCVLDMRSMDFKSNSAVAWSNKSDFACANAFNNSIIPEDTFFPSPESSCDVKLVEKSFETDTNLNFQNLSVIGFRILLLKVAGFNLLMTLRLWSS

SEQ ID NO: 7904 - protein, 99 aa, Artificial Sequence
  Synthetic Polypeptide
YITDKCVLDMRSMDFKSNSAVAWSNKSDFACANAFNNSIIPEDTFFPSPESSCDVKLVEKSFETDTNLNFQNLSVIGFRILLLKVAGFNLLMTLRLWSS

SEQ ID NO: 7905 - protein, 98 aa, Artificial Sequence
  Synthetic Polypeptide
ITDKCVLDMRSMDFKSNSAVAWSNKSDFACANAFNNSIIPEDTFFPSPESSCDVKLVEKSFETDTNLNFQNLSVIGFRILLLKVAGFNLLMTLRLWSS

SEQ ID NO: 7906 - protein, 97 aa, Artificial Sequence
  Synthetic Polypeptide
TDKCVLDMRSMDFKSNSAVAWSNKSDFACANAFNNSIIPEDTFFPSPESSCDVKLVEKSFETDTNLNFQNLSVIGFRILLLKVAGFNLLMTLRLWSS

SEQ ID NO: 7907 - protein, 96 aa, Artificial Sequence
  Synthetic Polypeptide
DKCVLDMRSMDFKSNSAVAWSNKSDFACANAFNNSIIPEDTFFPSPESSCDVKLVEKSFETDTNLNFQNLSVIGFRILLLKVAGFNLLMTLRLWSS

SEQ ID NO: 7908 - protein, 94 aa, Artificial Sequence; identical to SEQ ID NO: 3504
  Synthetic Polypeptide

SEQ ID NO: 7909 - protein, 93 aa, Artificial Sequence
  Synthetic Polypeptide
VLDMRSMDFKSNSAVAWSNKSDFACANAFNNSIIPEDTFFPSPESSCDVKLVEKSFETDTNLNFQNLSVIGFRILLLKVAGFNLLMTLRLWSS

SEQ ID NO: 7910 - protein, 92 aa, Artificial Sequence
  Synthetic Polypeptide
LDMRSMDFKSNSAVAWSNKSDFACANAFNNSIIPEDTFFPSPESSCDVKLVEKSFETDTNLNFQNLSVIGFRILLLKVAGFNLLMTLRLWSS

SEQ ID NO: 7911 - protein, 91 aa, Artificial Sequence
  Synthetic Polypeptide
DMRSMDFKSNSAVAWSNKSDFACANAFNNSIIPEDTFFPSPESSCDVKLVEKSFETDTNLNFQNLSVIGFRILLLKVAGFNLLMTLRLWSS

SEQ ID NO: 7912 - protein, 90 aa, Artificial Sequence
  Synthetic Polypeptide
MRSMDFKSNSAVAWSNKSDFACANAFNNSIIPEDTFFPSPESSCDVKLVEKSFETDTNLNFQNLSVIGFRILLLKVAGFNLLMTLRLWSS

SEQ ID NO: 7913 - protein, 89 aa, Artificial Sequence
  Synthetic Polypeptide
RSMDFKSNSAVAWSNKSDFACANAFNNSIIPEDTFFPSPESSCDVKLVEKSFETDTNLNFQNLSVIGFRILLLKVAGFNLLMTLRLWSS

SEQ ID NO: 7914 - protein, 88 aa, Artificial Sequence; identical to SEQ ID NO: 3505
  Synthetic Polypeptide

SEQ ID NO: 7915 - protein, 87 aa, Artificial Sequence
  Synthetic Polypeptide
MDFKSNSAVAWSNKSDFACANAFNNSIIPEDTFFPSPESSCDVKLVEKSFETDTNLNFQNLSVIGFRILLLKVAGFNLLMTLRLWSS

SEQ ID NO: 7916 - protein, 86 aa, Artificial Sequence
  Synthetic Polypeptide
DFKSNSAVAWSNKSDFACANAFNNSIIPEDTFFPSPESSCDVKLVEKSFETDTNLNFQNLSVIGFRILLLKVAGFNLLMTLRLWSS

SEQ ID NO: 7917 - protein, 85 aa, Artificial Sequence
  Synthetic Polypeptide
FKSNSAVAWSNKSDFACANAFNNSIIPEDTFFPSPESSCDVKLVEKSFETDTNLNFQNLSVIGFRILLLKVAGFNLLMTLRLWSS

SEQ ID NO: 7918 - protein, 84 aa, Artificial Sequence
  Synthetic Polypeptide
KSNSAVAWSNKSDFACANAFNNSIIPEDTFFPSPESSCDVKLVEKSFETDTNLNFQNLSVIGFRILLLKVAGFNLLMTLRLWSS

SEQ ID NO: 7919 - protein, 83 aa, Artificial Sequence
  Synthetic Polypeptide
SNSAVAWSNKSDFACANAFNNSIIPEDTFFPSPESSCDVKLVEKSFETDTNLNFQNLSVIGFRILLLKVAGFNLLMTLRLWSS

SEQ ID NO: 7920 - protein, 82 aa, Artificial Sequence
  Synthetic Polypeptide
NSAVAWSNKSDFACANAFNNSIIPEDTFFPSPESSCDVKLVEKSFETDTNLNFQNLSVIGFRILLLKVAGFNLLMTLRLWSS

SEQ ID NO: 7921 - protein, 81 aa, Artificial Sequence
  Synthetic Polypeptide
SAVAWSNKSDFACANAFNNSIIPEDTFFPSPESSCDVKLVEKSFETDTNLNFQNLSVIGFRILLLKVAGFNLLMTLRLWSS

SEQ ID NO: 7922 - protein, 80 aa, Artificial Sequence
  Synthetic Polypeptide
AVAWSNKSDFACANAFNNSIIPEDTFFPSPESSCDVKLVEKSFETDTNLNFQNLSVIGFRILLLKVAGFNLLMTLRLWSS

SEQ ID NO: 7923 - protein, 79 aa, Artificial Sequence
  Synthetic Polypeptide
VAWSNKSDFACANAFNNSIIPEDTFFPSPESSCDVKLVEKSFETDTNLNFQNLSVIGFRILLLKVAGFNLLMTLRLWSS

SEQ ID NO: 7924 - protein, 78 aa, Artificial Sequence
  Synthetic Polypeptide
AWSNKSDFACANAFNNSIIPEDTFFPSPESSCDVKLVEKSFETDTNLNFQNLSVIGFRILLLKVAGFNLLMTLRLWSS

SEQ ID NO: 7925 - protein, 77 aa, Artificial Sequence
  Synthetic Polypeptide
WSNKSDFACANAFNNSIIPEDTFFPSPESSCDVKLVEKSFETDTNLNFQNLSVIGFRILLLKVAGFNLLMTLRLWSS

SEQ ID NO: 7926 - protein, 76 aa, Artificial Sequence
  Synthetic Polypeptide
SNKSDFACANAFNNSIIPEDTFFPSPESSCDVKLVEKSFETDTNLNFQNLSVIGFRILLLKVAGFNLLMTLRLWSS

SEQ ID NO: 7927 - protein, 75 aa, Artificial Sequence
  Synthetic Polypeptide
NKSDFACANAFNNSIIPEDTFFPSPESSCDVKLVEKSFETDTNLNFQNLSVIGFRILLLKVAGFNLLMTLRLWSS

SEQ ID NO: 7928 - protein, 74 aa, Artificial Sequence
  Synthetic Polypeptide
KSDFACANAFNNSIIPEDTFFPSPESSCDVKLVEKSFETDTNLNFQNLSVIGFRILLLKVAGFNLLMTLRLWSS

SEQ ID NO: 7929 - protein, 73 aa, Artificial Sequence
  Synthetic Polypeptide
SDFACANAFNNSIIPEDTFFPSPESSCDVKLVEKSFETDTNLNFQNLSVIGFRILLLKVAGFNLLMTLRLWSS

SEQ ID NO: 7930 - protein, 72 aa, Artificial Sequence
  Synthetic Polypeptide
DFACANAFNNSIIPEDTFFPSPESSCDVKLVEKSFETDTNLNFQNLSVIGFRILLLKVAGFNLLMTLRLWSS

SEQ ID NO: 7931 - protein, 71 aa, Artificial Sequence
  Synthetic Polypeptide
FACANAFNNSIIPEDTFFPSPESSCDVKLVEKSFETDTNLNFQNLSVIGFRILLLKVAGFNLLMTLRLWSS

SEQ ID NO: 7932 - protein, 70 aa, Artificial Sequence
  Synthetic Polypeptide
ACANAFNNSIIPEDTFFPSPESSCDVKLVEKSFETDTNLNFQNLSVIGFRILLLKVAGFNLLMTLRLWSS

SEQ ID NO: 7933 - protein, 69 aa, Artificial Sequence
  Synthetic Polypeptide
CANAFNNSIIPEDTFFPSPESSCDVKLVEKSFETDTNLNFQNLSVIGFRILLLKVAGFNLLMTLRLWSS

SEQ ID NO: 7934 - protein, 68 aa, Artificial Sequence
  Synthetic Polypeptide
ANAFNNSIIPEDTFFPSPESSCDVKLVEKSFETDTNLNFQNLSVIGFRILLLKVAGFNLLMTLRLWSS

SEQ ID NO: 7935 - protein, 67 aa, Artificial Sequence
  Synthetic Polypeptide
NAFNNSIIPEDTFFPSPESSCDVKLVEKSFETDTNLNFQNLSVIGFRILLLKVAGFNLLMTLRLWSS

SEQ ID NO: 7936 - protein, 66 aa, Artificial Sequence
  Synthetic Polypeptide
AFNNSIIPEDTFFPSPESSCDVKLVEKSFETDTNLNFQNLSVIGFRILLLKVAGFNLLMTLRLWSS

SEQ ID NO: 7937 - protein, 65 aa, Artificial Sequence
  Synthetic Polypeptide
FNNSIIPEDTFFPSPESSCDVKLVEKSFETDTNLNFQNLSVIGFRILLLKVAGFNLLMTLRLWSS

SEQ ID NO: 7938 - protein, 64 aa, Artificial Sequence
  Synthetic Polypeptide
NNSIIPEDTFFPSPESSCDVKLVEKSFETDTNLNFQNLSVIGFRILLLKVAGFNLLMTLRLWSS

SEQ ID NO: 7939 - protein, 63 aa, Artificial Sequence
  Synthetic Polypeptide
NSIIPEDTFFPSPESSCDVKLVEKSFETDTNLNFQNLSVIGFRILLLKVAGFNLLMTLRLWSS

SEQ ID NO: 7940 - protein, 62 aa, Artificial Sequence
  Synthetic Polypeptide
SIIPEDTFFPSPESSCDVKLVEKSFETDTNLNFQNLSVIGFRILLLKVAGFNLLMTLRLWSS

SEQ ID NO: 7941 - protein, 61 aa, Artificial Sequence
  Synthetic Polypeptide
IIPEDTFFPSPESSCDVKLVEKSFETDTNLNFQNLSVIGFRILLLKVAGFNLLMTLRLWSS

SEQ ID NO: 7942 - protein, 60 aa, Artificial Sequence; identical to SEQ ID NO: 3506
  Synthetic Polypeptide

SEQ ID NO: 7943 - protein, 59 aa, Artificial Sequence
  Synthetic Polypeptide
PEDTFFPSPESSCDVKLVEKSFETDTNLNFQNLSVIGFRILLLKVAGFNLLMTLRLWSS

SEQ ID NO: 7944 - protein, 58 aa, Artificial Sequence
  Synthetic Polypeptide
EDTFFPSPESSCDVKLVEKSFETDTNLNFQNLSVIGFRILLLKVAGFNLLMTLRLWSS

SEQ ID NO: 7945 - protein, 57 aa, Artificial Sequence
  Synthetic Polypeptide
DTFFPSPESSCDVKLVEKSFETDTNLNFQNLSVIGFRILLLKVAGFNLLMTLRLWSS

SEQ ID NO: 7946 - protein, 56 aa, Artificial Sequence
  Synthetic Polypeptide
TFFPSPESSCDVKLVEKSFETDTNLNFQNLSVIGFRILLLKVAGFNLLMTLRLWSS

SEQ ID NO: 7947 - protein, 55 aa, Artificial Sequence
  Synthetic Polypeptide
FFPSPESSCDVKLVEKSFETDTNLNFQNLSVIGFRILLLKVAGFNLLMTLRLWSS

SEQ ID NO: 7948 - protein, 54 aa, Artificial Sequence
  Synthetic Polypeptide
FPSPESSCDVKLVEKSFETDTNLNFQNLSVIGFRILLLKVAGFNLLMTLRLWSS

SEQ ID NO: 7949 - protein, 53 aa, Artificial Sequence
  Synthetic Polypeptide
PSPESSCDVKLVEKSFETDTNLNFQNLSVIGFRILLLKVAGFNLLMTLRLWSS

SEQ ID NO: 7950 - protein, 52 aa, Artificial Sequence
  Synthetic Polypeptide
SPESSCDVKLVEKSFETDTNLNFQNLSVIGFRILLLKVAGFNLLMTLRLWSS

SEQ ID NO: 7951 - protein, 51 aa, Artificial Sequence
  Synthetic Polypeptide
PESSCDVKLVEKSFETDTNLNFQNLSVIGFRILLLKVAGFNLLMTLRLWSS

SEQ ID NO: 7952 - protein, 50 aa, Artificial Sequence; identical to SEQ ID NO: 3507
  Synthetic Polypeptide

SEQ ID NO: 7953 - protein, 49 aa, Artificial Sequence
  Synthetic Polypeptide
SSCDVKLVEKSFETDTNLNFQNLSVIGFRILLLKVAGFNLLMTLRLWSS

SEQ ID NO: 7954 - protein, 48 aa, Artificial Sequence
  Synthetic Polypeptide
SCDVKLVEKSFETDTNLNFQNLSVIGFRILLLKVAGFNLLMTLRLWSS

SEQ ID NO: 7955 - protein, 47 aa, Artificial Sequence
  Synthetic Polypeptide
CDVKLVEKSFETDTNLNFQNLSVIGFRILLLKVAGFNLLMTLRLWSS

SEQ ID NO: 7956 - protein, 46 aa, Artificial Sequence
  Synthetic Polypeptide
DVKLVEKSFETDTNLNFQNLSVIGFRILLLKVAGFNLLMTLRLWSS

SEQ ID NO: 7957 - protein, 45 aa, Artificial Sequence
  Synthetic Polypeptide
VKLVEKSFETDTNLNFQNLSVIGFRILLLKVAGFNLLMTLRLWSS

SEQ ID NO: 7958 - protein, 44 aa, Artificial Sequence
  Synthetic Polypeptide
KLVEKSFETDTNLNFQNLSVIGFRILLLKVAGFNLLMTLRLWSS

SEQ ID NO: 7959 - protein, 43 aa, Artificial Sequence
  Synthetic Polypeptide
LVEKSFETDTNLNFQNLSVIGFRILLLKVAGFNLLMTLRLWSS

SEQ ID NO: 7960 - protein, 42 aa, Artificial Sequence
  Synthetic Polypeptide
VEKSFETDTNLNFQNLSVIGFRILLLKVAGFNLLMTLRLWSS

SEQ ID NO: 7961 - protein, 41 aa, Artificial Sequence
  Synthetic Polypeptide
EKSFETDTNLNFQNLSVIGFRILLLKVAGFNLLMTLRLWSS

SEQ ID NO: 7962 - protein, 40 aa, Artificial Sequence
  Synthetic Polypeptide
KSFETDTNLNFQNLSVIGFRILLLKVAGFNLLMTLRLWSS

SEQ ID NO: 7963 - protein, 39 aa, Artificial Sequence
  Synthetic Polypeptide
SFETDTNLNFQNLSVIGFRILLLKVAGFNLLMTLRLWSS

SEQ ID NO: 7964 - protein, 179 aa, Artificial Sequence; identical to SEQ ID NO: 3453
  Synthetic Polypeptide

SEQ ID NO: 7965 - protein, 178 aa, Artificial Sequence
  Synthetic Polypeptide
DLKNVFPPEVAVFEPSEAEISHTQKATLVCLATGFYPDHVELSWWVNGKEVHSGVCTDPQPLKEQPALNDSRYCLSSRLRVSATFWQNPRNHFRCQVQFYGLSENDEWTQDRAKPVTQIVSAEAWGRADCGFTSESYQQGVLSATILYEILLGKATLYAVLVSALVLMAMVKRKDSRG

SEQ ID NO: 7966 - protein, 177 aa, Artificial Sequence
  Synthetic Polypeptide
LKNVFPPEVAVFEPSEAEISHTQKATLVCLATGFYPDHVELSWWVNGKEVHSGVCTDPQPLKEQPALNDSRYCLSSRLRVSATFWQNPRNHFRCQVQFYGLSENDEWTQDRAKPVTQIVSAEAWGRADCGFTSESYQQGVLSATILYEILLGKATLYAVLVSALVLMAMVKRKDSRG

SEQ ID NO: 7967 - protein, 176 aa, Artificial Sequence; identical to SEQ ID NO: 3509
  Synthetic Polypeptide

SEQ ID NO: 7968 - protein, 175 aa, Artificial Sequence; identical to SEQ ID NO: 3510
  Synthetic Polypeptide

SEQ ID NO: 7969 - protein, 174 aa, Artificial Sequence
  Synthetic Polypeptide
VFPPEVAVFEPSEAEISHTQKATLVCLATGFYPDHVELSWWVNGKEVHSGVCTDPQPLKEQPALNDSRYCLSSRLRVSATFWQNPRNHFRCQVQFYGLSENDEWTQDRAKPVTQIVSAEAWGRADCGFTSESYQQGVLSATILYEILLGKATLYAVLVSALVLMAMVKRKDSRG

SEQ ID NO: 7970 - protein, 173 aa, Artificial Sequence; identical to SEQ ID NO: 3511
  Synthetic Polypeptide

SEQ ID NO: 7971 - protein, 172 aa, Artificial Sequence
  Synthetic Polypeptide
PPEVAVFEPSEAEISHTQKATLVCLATGFYPDHVELSWWVNGKEVHSGVCTDPQPLKEQPALNDSRYCLSSRLRVSATFWQNPRNHFRCQVQFYGLSENDEWTQDRAKPVTQIVSAEAWGRADCGFTSESYQQGVLSATILYEILLGKATLYAVLVSALVLMAMVKRKDSRG

SEQ ID NO: 7972 - protein, 171 aa, Artificial Sequence
  Synthetic Polypeptide
PEVAVFEPSEAEISHTQKATLVCLATGFYPDHVELSWWVNGKEVHSGVCTDPQPLKEQPALNDSRYCLSSRLRVSATFWQNPRNHFRCQVQFYGLSENDEWTQDRAKPVTQIVSAEAWGRADCGFTSESYQQGVLSATILYEILLGKATLYAVLVSALVLMAMVKRKDSRG

SEQ ID NO: 7973 - protein, 170 aa, Artificial Sequence
  Synthetic Polypeptide
EVAVFEPSEAEISHTQKATLVCLATGFYPDHVELSWWVNGKEVHSGVCTDPQPLKEQPALNDSRYCLSSRLRVSATFWQNPRNHFRCQVQFYGLSENDEWTQDRAKPVTQIVSAEAWGRADCGFTSESYQQGVLSATILYEILLGKATLYAVLVSALVLMAMVKRKDSRG

SEQ ID NO: 7974 - protein, 169 aa, Artificial Sequence; identical to SEQ ID NO: 3512
  Synthetic Polypeptide

SEQ ID NO: 7975 - protein, 168 aa, Artificial Sequence
  Synthetic Polypeptide
AVFEPSEAEISHTQKATLVCLATGFYPDHVELSWWVNGKEVHSGVCTDPQPLKEQPALNDSRYCLSSRLRVSATFWQNPRNHFRCQVQFYGLSENDEWTQDRAKPVTQIVSAEAWGRADCGFTSESYQQGVLSATILYEILLGKATLYAVLVSALVLMAMVKRKDSRG

SEQ ID NO: 7976 - protein, 167 aa, Artificial Sequence
  Synthetic Polypeptide
VFEPSEAEISHTQKATLVCLATGFYPDHVELSWWVNGKEVHSGVCTDPQPLKEQPALNDSRYCLSSRLRVSATFWQNPRNHFRCQVQFYGLSENDEWTQDRAKPVTQIVSAEAWGRADCGFTSESYQQGVLSATILYEILLGKATLYAVLVSALVLMAMVKRKDSRG

SEQ ID NO: 7977 - protein, 166 aa, Artificial Sequence
  Synthetic Polypeptide
FEPSEAEISHTQKATLVCLATGFYPDHVELSWWVNGKEVHSGVCTDPQPLKEQPALNDSRYCLSSRLRVSATFWQNPRNHFRCQVQFYGLSENDEWTQDRAKPVTQIVSAEAWGRADCGFTSESYQQGVLSATILYEILLGKATLYAVLVSALVLMAMVKRKDSRG

SEQ ID NO: 7978 - protein, 165 aa, Artificial Sequence
  Synthetic Polypeptide
EPSEAEISHTQKATLVCLATGFYPDHVELSWWVNGKEVHSGVCTDPQPLKEQPALNDSRYCLSSRLRVSATFWQNPRNHFRCQVQFYGLSENDEWTQDRAKPVTQIVSAEAWGRADCGFTSESYQQGVLSATILYEILLGKATLYAVLVSALVLMAMVKRKDSRG

SEQ ID NO: 7979 - protein, 164 aa, Artificial Sequence; identical to SEQ ID NO: 3513
  Synthetic Polypeptide

SEQ ID NO: 7980 - protein, 163 aa, Artificial Sequence
  Synthetic Polypeptide
SEAEISHTQKATLVCLATGFYPDHVELSWWVNGKEVHSGVCTDPQPLKEQPALNDSRYCLSSRLRVSATFWQNPRNHFRCQVQFYGLSENDEWTQDRAKPVTQIVSAEAWGRADCGFTSESYQQGVLSATILYEILLGKATLYAVLVSALVLMAMVKRKDSRG

SEQ ID NO: 7981 - protein, 162 aa, Artificial Sequence
  Synthetic Polypeptide
EAEISHTQKATLVCLATGFYPDHVELSWWVNGKEVHSGVCTDPQPLKEQPALNDSRYCLSSRLRVSATFWQNPRNHFRCQVQFYGLSENDEWTQDRAKPVTQIVSAEAWGRADCGFTSESYQQGVLSATILYEILLGKATLYAVLVSALVLMAMVKRKDSRG

SEQ ID NO: 7982 - protein, 161 aa, Artificial Sequence; identical to SEQ ID NO: 3514
  Synthetic Polypeptide

SEQ ID NO: 7983 - protein, 160 aa, Artificial Sequence
  Synthetic Polypeptide
EISHTQKATLVCLATGFYPDHVELSWWVNGKEVHSGVCTDPQPLKEQPALNDSRYCLSSRLRVSATFWQNPRNHFRCQVQFYGLSENDEWTQDRAKPVTQIVSAEAWGRADCGFTSESYQQGVLSATILYEILLGKATLYAVLVSALVLMAMVKRKDSRG

SEQ ID NO: 7984 - protein, 159 aa, Artificial Sequence
  Synthetic Polypeptide
ISHTQKATLVCLATGFYPDHVELSWWVNGKEVHSGVCTDPQPLKEQPALNDSRYCLSSRLRVSATFWQNPRNHFRCQVQFYGLSENDEWTQDRAKPVTQIVSAEAWGRADCGFTSESYQQGVLSATILYEILLGKATLYAVLVSALVLMAMVKRKDSRG

SEQ ID NO: 7985 - protein, 158 aa, Artificial Sequence
  Synthetic Polypeptide
SHTQKATLVCLATGFYPDHVELSWWVNGKEVHSGVCTDPQPLKEQPALNDSRYCLSSRLRVSATFWQNPRNHFRCQVQFYGLSENDEWTQDRAKPVTQIVSAEAWGRADCGFTSESYQQGVLSATILYEILLGKATLYAVLVSALVLMAMVKRKDSRG

SEQ ID NO: 7986 - protein, 157 aa, Artificial Sequence
  Synthetic Polypeptide
HTQKATLVCLATGFYPDHVELSWWVNGKEVHSGVCTDPQPLKEQPALNDSRYCLSSRLRVSATFWQNPRNHFRCQVQFYGLSENDEWTQDRAKPVTQIVSAEAWGRADCGFTSESYQQGVLSATILYEILLGKATLYAVLVSALVLMAMVKRKDSRG

SEQ ID NO: 7987 - protein, 156 aa, Artificial Sequence
  Synthetic Polypeptide
TQKATLVCLATGFYPDHVELSWWVNGKEVHSGVCTDPQPLKEQPALNDSRYCLSSRLRVSATFWQNPRNHFRCQVQFYGLSENDEWTQDRAKPVTQIVSAEAWGRADCGFTSESYQQGVLSATILYEILLGKATLYAVLVSALVLMAMVKRKDSRG

SEQ ID NO: 7988 - protein, 155 aa, Artificial Sequence
  Synthetic Polypeptide
QKATLVCLATGFYPDHVELSWWVNGKEVHSGVCTDPQPLKEQPALNDSRYCLSSRLRVSATFWQNPRNHFRCQVQFYGLSENDEWTQDRAKPVTQIVSAEAWGRADCGFTSESYQQGVLSATILYEILLGKATLYAVLVSALVLMAMVKRKDSRG

SEQ ID NO: 7989 - protein, 154 aa, Artificial Sequence
  Synthetic Polypeptide
KATLVCLATGFYPDHVELSWWVNGKEVHSGVCTDPQPLKEQPALNDSRYCLSSRLRVSATFWQNPRNHFRCQVQFYGLSENDEWTQDRAKPVTQIVSAEAWGRADCGFTSESYQQGVLSATILYEILLGKATLYAVLVSALVLMAMVKRKDSRG

SEQ ID NO: 7990 - protein, 153 aa, Artificial Sequence
  Synthetic Polypeptide
ATLVCLATGFYPDHVELSWWVNGKEVHSGVCTDPQPLKEQPALNDSRYCLSSRLRVSATFWQNPRNHFRCQVQFYGLSENDEWTQDRAKPVTQIVSAEAWGRADCGFTSESYQQGVLSATILYEILLGKATLYAVLVSALVLMAMVKRKDSRG

SEQ ID NO: 7991 - protein, 152 aa, Artificial Sequence
  Synthetic Polypeptide
TLVCLATGFYPDHVELSWWVNGKEVHSGVCTDPQPLKEQPALNDSRYCLSSRLRVSATFWQNPRNHFRCQVQFYGLSENDEWTQDRAKPVTQIVSAEAWGRADCGFTSESYQQGVLSATILYEILLGKATLYAVLVSALVLMAMVKRKDSRG

SEQ ID NO: 7992 - protein, 151 aa, Artificial Sequence
  Synthetic Polypeptide
LVCLATGFYPDHVELSWWVNGKEVHSGVCTDPQPLKEQPALNDSRYCLSSRLRVSATFWQNPRNHFRCQVQFYGLSENDEWTQDRAKPVTQIVSAEAWGRADCGFTSESYQQGVLSATILYEILLGKATLYAVLVSALVLMAMVKRKDSRG

SEQ ID NO: 7993 - protein, 150 aa, Artificial Sequence
  Synthetic Polypeptide
VCLATGFYPDHVELSWWVNGKEVHSGVCTDPQPLKEQPALNDSRYCLSSRLRVSATFWQNPRNHFRCQVQFYGLSENDEWTQDRAKPVTQIVSAEAWGRADCGFTSESYQQGVLSATILYEILLGKATLYAVLVSALVLMAMVKRKDSRG

SEQ ID NO: 7994 - protein, 149 aa, Artificial Sequence; identical to SEQ ID NO: 3515
  Synthetic Polypeptide

SEQ ID NO: 7995 - protein, 148 aa, Artificial Sequence
  Synthetic Polypeptide
LATGFYPDHVELSWWVNGKEVHSGVCTDPQPLKEQPALNDSRYCLSSRLRVSATFWQNPRNHFRCQVQFYGLSENDEWTQDRAKPVTQIVSAEAWGRADCGFTSESYQQGVLSATILYEILLGKATLYAVLVSALVLMAMVKRKDSRG

SEQ ID NO: 7996 - protein, 147 aa, Artificial Sequence
  Synthetic Polypeptide
ATGFYPDHVELSWWVNGKEVHSGVCTDPQPLKEQPALNDSRYCLSSRLRVSATFWQNPRNHFRCQVQFYGLSENDEWTQDRAKPVTQIVSAEAWGRADCGFTSESYQQGVLSATILYEILLGKATLYAVLVSALVLMAMVKRKDSRG

SEQ ID NO: 7997 - protein, 146 aa, Artificial Sequence
  Synthetic Polypeptide
TGFYPDHVELSWWVNGKEVHSGVCTDPQPLKEQPALNDSRYCLSSRLRVSATFWQNPRNHFRCQVQFYGLSENDEWTQDRAKPVTQIVSAEAWGRADCGFTSESYQQGVLSATILYEILLGKATLYAVLVSALVLMAMVKRKDSRG

SEQ ID NO: 7998 - protein, 145 aa, Artificial Sequence
  Synthetic Polypeptide
GFYPDHVELSWWVNGKEVHSGVCTDPQPLKEQPALNDSRYCLSSRLRVSATFWQNPRNHFRCQVQFYGLSENDEWTQDRAKPVTQIVSAEAWGRADCGFTSESYQQGVLSATILYEILLGKATLYAVLVSALVLMAMVKRKDSRG

SEQ ID NO: 7999 - protein, 144 aa, Artificial Sequence
  Synthetic Polypeptide
FYPDHVELSWWVNGKEVHSGVCTDPQPLKEQPALNDSRYCLSSRLRVSATFWQNPRNHFRCQVQFYGLSENDEWTQDRAKPVTQIVSAEAWGRADCGFTSESYQQGVLSATILYEILLGKATLYAVLVSALVLMAMVKRKDSRG

SEQ ID NO: 8000 - protein, 143 aa, Artificial Sequence
  Synthetic Polypeptide
YPDHVELSWWVNGKEVHSGVCTDPQPLKEQPALNDSRYCLSSRLRVSATFWQNPRNHFRCQVQFYGLSENDEWTQDRAKPVTQIVSAEAWGRADCGFTSESYQQGVLSATILYEILLGKATLYAVLVSALVLMAMVKRKDSRG

SEQ ID NO: 8001 - protein, 142 aa, Artificial Sequence
  Synthetic Polypeptide
PDHVELSWWVNGKEVHSGVCTDPQPLKEQPALNDSRYCLSSRLRVSATFWQNPRNHFRCQVQFYGLSENDEWTQDRAKPVTQIVSAEAWGRADCGFTSESYQQGVLSATILYEILLGKATLYAVLVSALVLMAMVKRKDSRG

SEQ ID NO: 8002 - protein, 141 aa, Artificial Sequence
  Synthetic Polypeptide
DHVELSWWVNGKEVHSGVCTDPQPLKEQPALNDSRYCLSSRLRVSATFWQNPRNHFRCQVQFYGLSENDEWTQDRAKPVTQIVSAEAWGRADCGFTSESYQQGVLSATILYEILLGKATLYAVLVSALVLMAMVKRKDSRG

SEQ ID NO: 8003 - protein, 140 aa, Artificial Sequence
  Synthetic Polypeptide
HVELSWWVNGKEVHSGVCTDPQPLKEQPALNDSRYCLSSRLRVSATFWQNPRNHFRCQVQFYGLSENDEWTQDRAKPVTQIVSAEAWGRADCGFTSESYQQGVLSATILYEILLGKATLYAVLVSALVLMAMVKRKDSRG

SEQ ID NO: 8004 - protein, 139 aa, Artificial Sequence
  Synthetic Polypeptide
VELSWWVNGKEVHSGVCTDPQPLKEQPALNDSRYCLSSRLRVSATFWQNPRNHFRCQVQFYGLSENDEWTQDRAKPVTQIVSAEAWGRADCGFTSESYQQGVLSATILYEILLGKATLYAVLVSALVLMAMVKRKDSRG

SEQ ID NO: 8005 - protein, 138 aa, Artificial Sequence
  Synthetic Polypeptide
ELSWWVNGKEVHSGVCTDPQPLKEQPALNDSRYCLSSRLRVSATFWQNPRNHFRCQVQFYGLSENDEWTQDRAKPVTQIVSAEAWGRADCGFTSESYQQGVLSATILYEILLGKATLYAVLVSALVLMAMVKRKDSRG

SEQ ID NO: 8006 - protein, 137 aa, Artificial Sequence; identical to SEQ ID NO: 3516
  Synthetic Polypeptide

SEQ ID NO: 8007 - protein, 136 aa, Artificial Sequence
  Synthetic Polypeptide
SWWVNGKEVHSGVCTDPQPLKEQPALNDSRYCLSSRLRVSATFWQNPRNHFRCQVQFYGLSENDEWTQDRAKPVTQIVSAEAWGRADCGFTSESYQQGVLSATILYEILLGKATLYAVLVSALVLMAMVKRKDSRG

SEQ ID NO: 8008 - protein, 135 aa, Artificial Sequence
  Synthetic Polypeptide
WWVNGKEVHSGVCTDPQPLKEQPALNDSRYCLSSRLRVSATFWQNPRNHFRCQVQFYGLSENDEWTQDRAKPVTQIVSAEAWGRADCGFTSESYQQGVLSATILYEILLGKATLYAVLVSALVLMAMVKRKDSRG

SEQ ID NO: 8009 - protein, 134 aa, Artificial Sequence
  Synthetic Polypeptide
WVNGKEVHSGVCTDPQPLKEQPALNDSRYCLSSRLRVSATFWQNPRNHFRCQVQFYGLSENDEWTQDRAKPVTQIVSAEAWGRADCGFTSESYQQGVLSATILYEILLGKATLYAVLVSALVLMAMVKRKDSRG

SEQ ID NO: 8010 - protein, 133 aa, Artificial Sequence
  Synthetic Polypeptide
VNGKEVHSGVCTDPQPLKEQPALNDSRYCLSSRLRVSATFWQNPRNHFRCQVQFYGLSENDEWTQDRAKPVTQIVSAEAWGRADCGFTSESYQQGVLSATILYEILLGKATLYAVLVSALVLMAMVKRKDSRG

SEQ ID NO: 8011 - protein, 132 aa, Artificial Sequence
  Synthetic Polypeptide
NGKEVHSGVCTDPQPLKEQPALNDSRYCLSSRLRVSATFWQNPRNHFRCQVQFYGLSENDEWTQDRAKPVTQIVSAEAWGRADCGFTSESYQQGVLSATILYEILLGKATLYAVLVSALVLMAMVKRKDSRG

SEQ ID NO: 8012 - protein, 131 aa, Artificial Sequence
  Synthetic Polypeptide
GKEVHSGVCTDPQPLKEQPALNDSRYCLSSRLRVSATFWQNPRNHFRCQVQFYGLSENDEWTQDRAKPVTQIVSAEAWGRADCGFTSESYQQGVLSATILYEILLGKATLYAVLVSALVLMAMVKRKDSRG

SEQ ID NO: 8013 - protein, 130 aa, Artificial Sequence
  Synthetic Polypeptide
KEVHSGVCTDPQPLKEQPALNDSRYCLSSRLRVSATFWQNPRNHFRCQVQFYGLSENDEWTQDRAKPVTQIVSAEAWGRADCGFTSESYQQGVLSATILYEILLGKATLYAVLVSALVLMAMVKRKDSRG

SEQ ID NO: 8014 - protein, 129 aa, Artificial Sequence
  Synthetic Polypeptide
EVHSGVCTDPQPLKEQPALNDSRYCLSSRLRVSATFWQNPRNHFRCQVQFYGLSENDEWTQDRAKPVTQIVSAEAWGRADCGFTSESYQQGVLSATILYEILLGKATLYAVLVSALVLMAMVKRKDSRG

SEQ ID NO: 8015 - protein, 128 aa, Artificial Sequence; identical to SEQ ID NO: 3517
  Synthetic Polypeptide

SEQ ID NO: 8016 - protein, 127 aa, Artificial Sequence
  Synthetic Polypeptide
HSGVCTDPQPLKEQPALNDSRYCLSSRLRVSATFWQNPRNHFRCQVQFYGLSENDEWTQDRAKPVTQIVSAEAWGRADCGFTSESYQQGVLSATILYEILLGKATLYAVLVSALVLMAMVKRKDSRG

SEQ ID NO: 8017 - protein, 126 aa, Artificial Sequence
  Synthetic Polypeptide
SGVCTDPQPLKEQPALNDSRYCLSSRLRVSATFWQNPRNHFRCQVQFYGLSENDEWTQDRAKPVTQIVSAEAWGRADCGFTSESYQQGVLSATILYEILLGKATLYAVLVSALVLMAMVKRKDSRG

SEQ ID NO: 8018 - protein, 125 aa, Artificial Sequence
  Synthetic Polypeptide
GVCTDPQPLKEQPALNDSRYCLSSRLRVSATFWQNPRNHFRCQVQFYGLSENDEWTQDRAKPVTQIVSAEAWGRADCGFTSESYQQGVLSATILYEILLGKATLYAVLVSALVLMAMVKRKDSRG

SEQ ID NO: 8019 - protein, 124 aa, Artificial Sequence
  Synthetic Polypeptide
VCTDPQPLKEQPALNDSRYCLSSRLRVSATFWQNPRNHFRCQVQFYGLSENDEWTQDRAKPVTQIVSAEAWGRADCGFTSESYQQGVLSATILYEILLGKATLYAVLVSALVLMAMVKRKDSRG

SEQ ID NO: 8020 - protein, 123 aa, Artificial Sequence; identical to SEQ ID NO: 3518
  Synthetic Polypeptide

SEQ ID NO: 8021 - protein, 122 aa, Artificial Sequence
  Synthetic Polypeptide
TDPQPLKEQPALNDSRYCLSSRLRVSATFWQNPRNHFRCQVQFYGLSENDEWTQDRAKPVTQIVSAEAWGRADCGFTSESYQQGVLSATILYEILLGKATLYAVLVSALVLMAMVKRKDSRG

SEQ ID NO: 8022 - protein, 121 aa, Artificial Sequence
  Synthetic Polypeptide
DPQPLKEQPALNDSRYCLSSRLRVSATFWQNPRNHFRCQVQFYGLSENDEWTQDRAKPVTQIVSAEAWGRADCGFTSESYQQGVLSATILYEILLGKATLYAVLVSALVLMAMVKRKDSRG

SEQ ID NO: 8023 - protein, 120 aa, Artificial Sequence
  Synthetic Polypeptide
PQPLKEQPALNDSRYCLSSRLRVSATFWQNPRNHFRCQVQFYGLSENDEWTQDRAKPVTQIVSAEAWGRADCGFTSESYQQGVLSATILYEILLGKATLYAVLVSALVLMAMVKRKDSRG

SEQ ID NO: 8024 - protein, 119 aa, Artificial Sequence
  Synthetic Polypeptide
QPLKEQPALNDSRYCLSSRLRVSATFWQNPRNHFRCQVQFYGLSENDEWTQDRAKPVTQIVSAEAWGRADCGFTSESYQQGVLSATILYEILLGKATLYAVLVSALVLMAMVKRKDSRG

SEQ ID NO: 8025 - protein, 118 aa, Artificial Sequence
  Synthetic Polypeptide
PLKEQPALNDSRYCLSSRLRVSATFWQNPRNHFRCQVQFYGLSENDEWTQDRAKPVTQIVSAEAWGRADCGFTSESYQQGVLSATILYEILLGKATLYAVLVSALVLMAMVKRKDSRG

SEQ ID NO: 8026 - protein, 117 aa, Artificial Sequence
  Synthetic Polypeptide
LKEQPALNDSRYCLSSRLRVSATFWQNPRNHFRCQVQFYGLSENDEWTQDRAKPVTQIVSAEAWGRADCGFTSESYQQGVLSATILYEILLGKATLYAVLVSALVLMAMVKRKDSRG

SEQ ID NO: 8027 - protein, 116 aa, Artificial Sequence
  Synthetic Polypeptide
KEQPALNDSRYCLSSRLRVSATFWQNPRNHFRCQVQFYGLSENDEWTQDRAKPVTQIVSAEAWGRADCGFTSESYQQGVLSATILYEILLGKATLYAVLVSALVLMAMVKRKDSRG

SEQ ID NO: 8028 - protein, 115 aa, Artificial Sequence; identical to SEQ ID NO: 3519
  Synthetic Polypeptide

SEQ ID NO: 8029 - protein, 114 aa, Artificial Sequence
  Synthetic Polypeptide
QPALNDSRYCLSSRLRVSATFWQNPRNHFRCQVQFYGLSENDEWTQDRAKPVTQIVSAEAWGRADCGFTSESYQQGVLSATILYEILLGKATLYAVLVSALVLMAMVKRKDSRG

SEQ ID NO: 8030 - protein, 113 aa, Artificial Sequence
  Synthetic Polypeptide
PALNDSRYCLSSRLRVSATFWQNPRNHFRCQVQFYGLSENDEWTQDRAKPVTQIVSAEAWGRADCGFTSESYQQGVLSATILYEILLGKATLYAVLVSALVLMAMVKRKDSRG

SEQ ID NO: 8031 - protein, 112 aa, Artificial Sequence
  Synthetic Polypeptide
ALNDSRYCLSSRLRVSATFWQNPRNHFRCQVQFYGLSENDEWTQDRAKPVTQIVSAEAWGRADCGFTSESYQQGVLSATILYEILLGKATLYAVLVSALVLMAMVKRKDSRG

SEQ ID NO: 8032 - protein, 111 aa, Artificial Sequence
  Synthetic Polypeptide
LNDSRYCLSSRLRVSATFWQNPRNHFRCQVQFYGLSENDEWTQDRAKPVTQIVSAEAWGRADCGFTSESYQQGVLSATILYEILLGKATLYAVLVSALVLMAMVKRKDSRG

SEQ ID NO: 8033 - protein, 110 aa, Artificial Sequence
  Synthetic Polypeptide
NDSRYCLSSRLRVSATFWQNPRNHFRCQVQFYGLSENDEWTQDRAKPVTQIVSAEAWGRADCGFTSESYQQGVLSATILYEILLGKATLYAVLVSALVLMAMVKRKDSRG

SEQ ID NO: 8034 - protein, 109 aa, Artificial Sequence
  Synthetic Polypeptide
DSRYCLSSRLRVSATFWQNPRNHFRCQVQFYGLSENDEWTQDRAKPVTQIVSAEAWGRADCGFTSESYQQGVLSATILYEILLGKATLYAVLVSALVLMAMVKRKDSRG

SEQ ID NO: 8035 - protein, 108 aa, Artificial Sequence
  Synthetic Polypeptide
SRYCLSSRLRVSATFWQNPRNHFRCQVQFYGLSENDEWTQDRAKPVTQIVSAEAWGRADCGFTSESYQQGVLSATILYEILLGKATLYAVLVSALVLMAMVKRKDSRG

SEQ ID NO: 8036 - protein, 107 aa, Artificial Sequence
  Synthetic Polypeptide
RYCLSSRLRVSATFWQNPRNHFRCQVQFYGLSENDEWTQDRAKPVTQIVSAEAWGRADCGFTSESYQQGVLSATILYEILLGKATLYAVLVSALVLMAMVKRKDSRG

SEQ ID NO: 8037 - protein, 106 aa, Artificial Sequence
  Synthetic Polypeptide
YCLSSRLRVSATFWQNPRNHFRCQVQFYGLSENDEWTQDRAKPVTQIVSAEAWGRADCGFTSESYQQGVLSATILYEILLGKATLYAVLVSALVLMAMVKRKDSRG

SEQ ID NO: 8038 - protein, 105 aa, Artificial Sequence
  Synthetic Polypeptide
CLSSRLRVSATFWQNPRNHFRCQVQFYGLSENDEWTQDRAKPVTQIVSAEAWGRADCGFTSESYQQGVLSATILYEILLGKATLYAVLVSALVLMAMVKRKDSRG

SEQ ID NO: 8039 - protein, 104 aa, Artificial Sequence
  Synthetic Polypeptide
LSSRLRVSATFWQNPRNHFRCQVQFYGLSENDEWTQDRAKPVTQIVSAEAWGRADCGFTSESYQQGVLSATILYEILLGKATLYAVLVSALVLMAMVKRKDSRG

SEQ ID NO: 8040 - protein, 103 aa, Artificial Sequence
  Synthetic Polypeptide
SSRLRVSATFWQNPRNHFRCQVQFYGLSENDEWTQDRAKPVTQIVSAEAWGRADCGFTSESYQQGVLSATILYEILLGKATLYAVLVSALVLMAMVKRKDSRG

SEQ ID NO: 8041 - protein, 102 aa, Artificial Sequence
  Synthetic Polypeptide
SRLRVSATFWQNPRNHFRCQVQFYGLSENDEWTQDRAKPVTQIVSAEAWGRADCGFTSESYQQGVLSATILYEILLGKATLYAVLVSALVLMAMVKRKDSRG

SEQ ID NO: 8042 - protein, 101 aa, Artificial Sequence
  Synthetic Polypeptide
RLRVSATFWQNPRNHFRCQVQFYGLSENDEWTQDRAKPVTQIVSAEAWGRADCGFTSESYQQGVLSATILYEILLGKATLYAVLVSALVLMAMVKRKDSRG

SEQ ID NO: 8043 - protein, 100 aa, Artificial Sequence
  Synthetic Polypeptide
LRVSATFWQNPRNHFRCQVQFYGLSENDEWTQDRAKPVTQIVSAEAWGRADCGFTSESYQQGVLSATILYEILLGKATLYAVLVSALVLMAMVKRKDSRG

SEQ ID NO: 8044 - protein, 99 aa, Artificial Sequence
  Synthetic Polypeptide
RVSATFWQNPRNHFRCQVQFYGLSENDEWTQDRAKPVTQIVSAEAWGRADCGFTSESYQQGVLSATILYEILLGKATLYAVLVSALVLMAMVKRKDSRG

SEQ ID NO: 8045 - protein, 98 aa, Artificial Sequence
  Synthetic Polypeptide
VSATFWQNPRNHFRCQVQFYGLSENDEWTQDRAKPVTQIVSAEAWGRADCGFTSESYQQGVLSATILYEILLGKATLYAVLVSALVLMAMVKRKDSRG

SEQ ID NO: 8046 - protein, 97 aa, Artificial Sequence
  Synthetic Polypeptide
SATFWQNPRNHFRCQVQFYGLSENDEWTQDRAKPVTQIVSAEAWGRADCGFTSESYQQGVLSATILYEILLGKATLYAVLVSALVLMAMVKRKDSRG

SEQ ID NO: 8047 - protein, 96 aa, Artificial Sequence
  Synthetic Polypeptide
ATFWQNPRNHFRCQVQFYGLSENDEWTQDRAKPVTQIVSAEAWGRADCGFTSESYQQGVLSATILYEILLGKATLYAVLVSALVLMAMVKRKDSRG

SEQ ID NO: 8048 - protein, 95 aa, Artificial Sequence
  Synthetic Polypeptide
TFWQNPRNHFRCQVQFYGLSENDEWTQDRAKPVTQIVSAEAWGRADCGFTSESYQQGVLSATILYEILLGKATLYAVLVSALVLMAMVKRKDSRG

SEQ ID NO: 8049 - protein, 94 aa, Artificial Sequence
  Synthetic Polypeptide
FWQNPRNHFRCQVQFYGLSENDEWTQDRAKPVTQIVSAEAWGRADCGFTSESYQQGVLSATILYEILLGKATLYAVLVSALVLMAMVKRKDSRG

SEQ ID NO: 8050 - protein, 93 aa, Artificial Sequence
  Synthetic Polypeptide
WQNPRNHFRCQVQFYGLSENDEWTQDRAKPVTQIVSAEAWGRADCGFTSESYQQGVLSATILYEILLGKATLYAVLVSALVLMAMVKRKDSRG

SEQ ID NO: 8051 - protein, 92 aa, Artificial Sequence
  Synthetic Polypeptide
QNPRNHFRCQVQFYGLSENDEWTQDRAKPVTQIVSAEAWGRADCGFTSESYQQGVLSATILYEILLGKATLYAVLVSALVLMAMVKRKDSRG

SEQ ID NO: 8052 - protein, 91 aa, Artificial Sequence
  Synthetic Polypeptide
NPRNHFRCQVQFYGLSENDEWTQDRAKPVTQIVSAEAWGRADCGFTSESYQQGVLSATILYEILLGKATLYAVLVSALVLMAMVKRKDSRG

SEQ ID NO: 8053 - protein, 90 aa, Artificial Sequence
  Synthetic Polypeptide
PRNHFRCQVQFYGLSENDEWTQDRAKPVTQIVSAEAWGRADCGFTSESYQQGVLSATILYEILLGKATLYAVLVSALVLMAMVKRKDSRG

SEQ ID NO: 8054 - protein, 89 aa, Artificial Sequence
  Synthetic Polypeptide
RNHFRCQVQFYGLSENDEWTQDRAKPVTQIVSAEAWGRADCGFTSESYQQGVLSATILYEILLGKATLYAVLVSALVLMAMVKRKDSRG

SEQ ID NO: 8055 - protein, 88 aa, Artificial Sequence
  Synthetic Polypeptide
NHFRCQVQFYGLSENDEWTQDRAKPVTQIVSAEAWGRADCGFTSESYQQGVLSATILYEILLGKATLYAVLVSALVLMAMVKRKDSRG

SEQ ID NO: 8056 - protein, 87 aa, Artificial Sequence
  Synthetic Polypeptide
HFRCQVQFYGLSENDEWTQDRAKPVTQIVSAEAWGRADCGFTSESYQQGVLSATILYEILLGKATLYAVLVSALVLMAMVKRKDSRG

SEQ ID NO: 8057 - protein, 86 aa, Artificial Sequence
  Synthetic Polypeptide
FRCQVQFYGLSENDEWTQDRAKPVTQIVSAEAWGRADCGFTSESYQQGVLSATILYEILLGKATLYAVLVSALVLMAMVKRKDSRG

SEQ ID NO: 8058 - protein, 85 aa, Artificial Sequence
  Synthetic Polypeptide
RCQVQFYGLSENDEWTQDRAKPVTQIVSAEAWGRADCGFTSESYQQGVLSATILYEILLGKATLYAVLVSALVLMAMVKRKDSRG

SEQ ID NO: 8059 - protein, 84 aa, Artificial Sequence
  Synthetic Polypeptide
CQVQFYGLSENDEWTQDRAKPVTQIVSAEAWGRADCGFTSESYQQGVLSATILYEILLGKATLYAVLVSALVLMAMVKRKDSRG

SEQ ID NO: 8060 - protein, 83 aa, Artificial Sequence
  Synthetic Polypeptide
QVQFYGLSENDEWTQDRAKPVTQIVSAEAWGRADCGFTSESYQQGVLSATILYEILLGKATLYAVLVSALVLMAMVKRKDSRG

SEQ ID NO: 8061 - protein, 82 aa, Artificial Sequence
  Synthetic Polypeptide
VQFYGLSENDEWTQDRAKPVTQIVSAEAWGRADCGFTSESYQQGVLSATILYEILLGKATLYAVLVSALVLMAMVKRKDSRG

SEQ ID NO: 8062 - protein, 81 aa, Artificial Sequence
  Synthetic Polypeptide
QFYGLSENDEWTQDRAKPVTQIVSAEAWGRADCGFTSESYQQGVLSATILYEILLGKATLYAVLVSALVLMAMVKRKDSRG

SEQ ID NO: 8063 - protein, 80 aa, Artificial Sequence
  Synthetic Polypeptide
FYGLSENDEWTQDRAKPVTQIVSAEAWGRADCGFTSESYQQGVLSATILYEILLGKATLYAVLVSALVLMAMVKRKDSRG

SEQ ID NO: 8064 - protein, 79 aa, Artificial Sequence
  Synthetic Polypeptide
YGLSENDEWTQDRAKPVTQIVSAEAWGRADCGFTSESYQQGVLSATILYEILLGKATLYAVLVSALVLMAMVKRKDSRG

SEQ ID NO: 8065 - protein, 78 aa, Artificial Sequence
  Synthetic Polypeptide
GLSENDEWTQDRAKPVTQIVSAEAWGRADCGFTSESYQQGVLSATILYEILLGKATLYAVLVSALVLMAMVKRKDSRG

SEQ ID NO: 8066 - protein, 77 aa, Artificial Sequence
  Synthetic Polypeptide
LSENDEWTQDRAKPVTQIVSAEAWGRADCGFTSESYQQGVLSATILYEILLGKATLYAVLVSALVLMAMVKRKDSRG

SEQ ID NO: 8067 - protein, 76 aa, Artificial Sequence
  Synthetic Polypeptide
SENDEWTQDRAKPVTQIVSAEAWGRADCGFTSESYQQGVLSATILYEILLGKATLYAVLVSALVLMAMVKRKDSRG

SEQ ID NO: 8068 - protein, 75 aa, Artificial Sequence
  Synthetic Polypeptide
ENDEWTQDRAKPVTQIVSAEAWGRADCGFTSESYQQGVLSATILYEILLGKATLYAVLVSALVLMAMVKRKDSRG

SEQ ID NO: 8069 - protein, 74 aa, Artificial Sequence
  Synthetic Polypeptide
NDEWTQDRAKPVTQIVSAEAWGRADCGFTSESYQQGVLSATILYEILLGKATLYAVLVSALVLMAMVKRKDSRG

SEQ ID NO: 8070 - protein, 73 aa, Artificial Sequence
  Synthetic Polypeptide
DEWTQDRAKPVTQIVSAEAWGRADCGFTSESYQQGVLSATILYEILLGKATLYAVLVSALVLMAMVKRKDSRG

SEQ ID NO: 8071 - protein, 72 aa, Artificial Sequence
  Synthetic Polypeptide
EWTQDRAKPVTQIVSAEAWGRADCGFTSESYQQGVLSATILYEILLGKATLYAVLVSALVLMAMVKRKDSRG

SEQ ID NO: 8072 - protein, 71 aa, Artificial Sequence
  Synthetic Polypeptide
WTQDRAKPVTQIVSAEAWGRADCGFTSESYQQGVLSATILYEILLGKATLYAVLVSALVLMAMVKRKDSRG

SEQ ID NO: 8073 - protein, 70 aa, Artificial Sequence
  Synthetic Polypeptide
TQDRAKPVTQIVSAEAWGRADCGFTSESYQQGVLSATILYEILLGKATLYAVLVSALVLMAMVKRKDSRG

SEQ ID NO: 8074 - protein, 69 aa, Artificial Sequence
  Synthetic Polypeptide
QDRAKPVTQIVSAEAWGRADCGFTSESYQQGVLSATILYEILLGKATLYAVLVSALVLMAMVKRKDSRG

SEQ ID NO: 8075 - protein, 68 aa, Artificial Sequence
  Synthetic Polypeptide
DRAKPVTQIVSAEAWGRADCGFTSESYQQGVLSATILYEILLGKATLYAVLVSALVLMAMVKRKDSRG

SEQ ID NO: 8076 - protein, 67 aa, Artificial Sequence
  Synthetic Polypeptide
RAKPVTQIVSAEAWGRADCGFTSESYQQGVLSATILYEILLGKATLYAVLVSALVLMAMVKRKDSRG

SEQ ID NO: 8077 - protein, 66 aa, Artificial Sequence
  Synthetic Polypeptide
AKPVTQIVSAEAWGRADCGFTSESYQQGVLSATILYEILLGKATLYAVLVSALVLMAMVKRKDSRG

SEQ ID NO: 8078 - protein, 65 aa, Artificial Sequence
  Synthetic Polypeptide
KPVTQIVSAEAWGRADCGFTSESYQQGVLSATILYEILLGKATLYAVLVSALVLMAMVKRKDSRG

SEQ ID NO: 8079 - protein, 64 aa, Artificial Sequence
  Synthetic Polypeptide
PVTQIVSAEAWGRADCGFTSESYQQGVLSATILYEILLGKATLYAVLVSALVLMAMVKRKDSRG

SEQ ID NO: 8080 - protein, 63 aa, Artificial Sequence
  Synthetic Polypeptide
VTQIVSAEAWGRADCGFTSESYQQGVLSATILYEILLGKATLYAVLVSALVLMAMVKRKDSRG

SEQ ID NO: 8081 - protein, 62 aa, Artificial Sequence
  Synthetic Polypeptide
TQIVSAEAWGRADCGFTSESYQQGVLSATILYEILLGKATLYAVLVSALVLMAMVKRKDSRG

SEQ ID NO: 8082 - protein, 61 aa, Artificial Sequence
  Synthetic Polypeptide
QIVSAEAWGRADCGFTSESYQQGVLSATILYEILLGKATLYAVLVSALVLMAMVKRKDSRG

SEQ ID NO: 8083 - protein, 60 aa, Artificial Sequence
  Synthetic Polypeptide
IVSAEAWGRADCGFTSESYQQGVLSATILYEILLGKATLYAVLVSALVLMAMVKRKDSRG

SEQ ID NO: 8084 - protein, 59 aa, Artificial Sequence
  Synthetic Polypeptide
VSAEAWGRADCGFTSESYQQGVLSATILYEILLGKATLYAVLVSALVLMAMVKRKDSRG

SEQ ID NO: 8085 - protein, 58 aa, Artificial Sequence
  Synthetic Polypeptide
SAEAWGRADCGFTSESYQQGVLSATILYEILLGKATLYAVLVSALVLMAMVKRKDSRG

SEQ ID NO: 8086 - protein, 57 aa, Artificial Sequence
  Synthetic Polypeptide
AEAWGRADCGFTSESYQQGVLSATILYEILLGKATLYAVLVSALVLMAMVKRKDSRG

SEQ ID NO: 8087 - protein, 56 aa, Artificial Sequence
  Synthetic Polypeptide
EAWGRADCGFTSESYQQGVLSATILYEILLGKATLYAVLVSALVLMAMVKRKDSRG

SEQ ID NO: 8088 - protein, 55 aa, Artificial Sequence
  Synthetic Polypeptide
AWGRADCGFTSESYQQGVLSATILYEILLGKATLYAVLVSALVLMAMVKRKDSRG

SEQ ID NO: 8089 - protein, 54 aa, Artificial Sequence
  Synthetic Polypeptide
WGRADCGFTSESYQQGVLSATILYEILLGKATLYAVLVSALVLMAMVKRKDSRG

SEQ ID NO: 8090 - protein, 53 aa, Artificial Sequence; identical to SEQ ID NO: 3520
  Synthetic Polypeptide

SEQ ID NO: 8091 - protein, 173 aa, Artificial Sequence; identical to SEQ ID NO: 3476
  Synthetic Polypeptide

SEQ ID NO: 8092 - protein, 172 aa, Artificial Sequence
  Synthetic Polypeptide
KQLDADVSPKPTIFLPSIAETKLQKAGTYLCLLEKFFPDVIKIHWQEKKSNTILGSQEGNTMKTNDTYMKFSWLTVPEKSLDKEHRCIVRHENNKNGVDQEIIFPPIKTDVITMDPKDNCSKDANDTLLLQLTNTSAYYMYLLLLLKSVVYFAIITCCLLRRTAFCCNGEKS

SEQ ID NO: 8093 - protein, 171 aa, Artificial Sequence
  Synthetic Polypeptide
QLDADVSPKPTIFLPSIAETKLQKAGTYLCLLEKFFPDVIKIHWQEKKSNTILGSQEGNTMKTNDTYMKFSWLTVPEKSLDKEHRCIVRHENNKNGVDQEIIFPPIKTDVITMDPKDNCSKDANDTLLLQLTNTSAYYMYLLLLLKSVVYFAIITCCLLRRTAFCCNGEKS

SEQ ID NO: 8094 - protein, 170 aa, Artificial Sequence
  Synthetic Polypeptide
LDADVSPKPTIFLPSIAETKLQKAGTYLCLLEKFFPDVIKIHWQEKKSNTILGSQEGNTMKTNDTYMKFSWLTVPEKSLDKEHRCIVRHENNKNGVDQEIIFPPIKTDVITMDPKDNCSKDANDTLLLQLTNTSAYYMYLLLLLKSVVYFAIITCCLLRRTAFCCNGEKS

SEQ ID NO: 8095 - protein, 169 aa, Artificial Sequence
  Synthetic Polypeptide
DADVSPKPTIFLPSIAETKLQKAGTYLCLLEKFFPDVIKIHWQEKKSNTILGSQEGNTMKTNDTYMKFSWLTVPEKSLDKEHRCIVRHENNKNGVDQEIIFPPIKTDVITMDPKDNCSKDANDTLLLQLTNTSAYYMYLLLLLKSVVYFAIITCCLLRRTAFCCNGEKS

SEQ ID NO: 8096 - protein, 168 aa, Artificial Sequence; identical to SEQ ID NO: 3523
  Synthetic Polypeptide

SEQ ID NO: 8097 - protein, 167 aa, Artificial Sequence
  Synthetic Polypeptide
DVSPKPTIFLPSIAETKLQKAGTYLCLLEKFFPDVIKIHWQEKKSNTILGSQEGNTMKTNDTYMKFSWLTVPEKSLDKEHRCIVRHENNKNGVDQEIIFPPIKTDVITMDPKDNCSKDANDTLLLQLTNTSAYYMYLLLLLKSVVYFAIITCCLLRRTAFCCNGEKS

SEQ ID NO: 8098 - protein, 166 aa, Artificial Sequence; identical to SEQ ID NO: 3524
  Synthetic Polypeptide

SEQ ID NO: 8099 - protein, 165 aa, Artificial Sequence
  Synthetic Polypeptide
SPKPTIFLPSIAETKLQKAGTYLCLLEKFFPDVIKIHWQEKKSNTILGSQEGNTMKTNDTYMKFSWLTVPEKSLDKEHRCIVRHENNKNGVDQEIIFPPIKTDVITMDPKDNCSKDANDTLLLQLTNTSAYYMYLLLLLKSVVYFAIITCCLLRRTAFCCNGEKS

SEQ ID NO: 8100 - protein, 164 aa, Artificial Sequence
  Synthetic Polypeptide
PKPTIFLPSIAETKLQKAGTYLCLLEKFFPDVIKIHWQEKKSNTILGSQEGNTMKTNDTYMKFSWLTVPEKSLDKEHRCIVRHENNKNGVDQEIIFPPIKTDVITMDPKDNCSKDANDTLLLQLTNTSAYYMYLLLLLKSVVYFAIITCCLLRRTAFCCNGEKS

SEQ ID NO: 8101 - protein, 163 aa, Artificial Sequence
  Synthetic Polypeptide
KPTIFLPSIAETKLQKAGTYLCLLEKFFPDVIKIHWQEKKSNTILGSQEGNTMKTNDTYMKFSWLTVPEKSLDKEHRCIVRHENNKNGVDQEIIFPPIKTDVITMDPKDNCSKDANDTLLLQLTNTSAYYMYLLLLLKSVVYFAIITCCLLRRTAFCCNGEKS

SEQ ID NO: 8102 - protein, 162 aa, Artificial Sequence
  Synthetic Polypeptide
PTIFLPSIAETKLQKAGTYLCLLEKFFPDVIKIHWQEKKSNTILGSQEGNTMKTNDTYMKFSWLTVPEKSLDKEHRCIVRHENNKNGVDQEIIFPPIKTDVITMDPKDNCSKDANDTLLLQLTNTSAYYMYLLLLLKSVVYFAIITCCLLRRTAFCCNGEKS

SEQ ID NO: 8103 - protein, 161 aa, Artificial Sequence; identical to SEQ ID NO: 3525
  Synthetic Polypeptide

SEQ ID NO: 8104 - protein, 160 aa, Artificial Sequence
  Synthetic Polypeptide
IFLPSIAETKLQKAGTYLCLLEKFFPDVIKIHWQEKKSNTILGSQEGNTMKTNDTYMKFSWLTVPEKSLDKEHRCIVRHENNKNGVDQEIIFPPIKTDVITMDPKDNCSKDANDTLLLQLTNTSAYYMYLLLLLKSVVYFAIITCCLLRRTAFCCNGEKS

SEQ ID NO: 8105 - protein, 159 aa, Artificial Sequence
  Synthetic Polypeptide
FLPSIAETKLQKAGTYLCLLEKFFPDVIKIHWQEKKSNTILGSQEGNTMKTNDTYMKFSWLTVPEKSLDKEHRCIVRHENNKNGVDQEIIFPPIKTDVITMDPKDNCSKDANDTLLLQLTNTSAYYMYLLLLLKSVVYFAIITCCLLRRTAFCCNGEKS

SEQ ID NO: 8106 - protein, 158 aa, Artificial Sequence
  Synthetic Polypeptide
LPSIAETKLQKAGTYLCLLEKFFPDVIKIHWQEKKSNTILGSQEGNTMKTNDTYMKFSWLTVPEKSLDKEHRCIVRHENNKNGVDQEIIFPPIKTDVITMDPKDNCSKDANDTLLLQLTNTSAYYMYLLLLLKSVVYFAIITCCLLRRTAFCCNGEKS

SEQ ID NO: 8107 - protein, 157 aa, Artificial Sequence
  Synthetic Polypeptide
PSIAETKLQKAGTYLCLLEKFFPDVIKIHWQEKKSNTILGSQEGNTMKTNDTYMKFSWLTVPEKSLDKEHRCIVRHENNKNGVDQEIIFPPIKTDVITMDPKDNCSKDANDTLLLQLTNTSAYYMYLLLLLKSVVYFAIITCCLLRRTAFCCNGEKS

SEQ ID NO: 8108 - protein, 156 aa, Artificial Sequence
  Synthetic Polypeptide
SIAETKLQKAGTYLCLLEKFFPDVIKIHWQEKKSNTILGSQEGNTMKTNDTYMKFSWLTVPEKSLDKEHRCIVRHENNKNGVDQEIIFPPIKTDVITMDPKDNCSKDANDTLLLQLTNTSAYYMYLLLLLKSVVYFAIITCCLLRRTAFCCNGEKS

SEQ ID NO: 8109 - protein, 155 aa, Artificial Sequence
  Synthetic Polypeptide
IAETKLQKAGTYLCLLEKFFPDVIKIHWQEKKSNTILGSQEGNTMKTNDTYMKFSWLTVPEKSLDKEHRCIVRHENNKNGVDQEIIFPPIKTDVITMDPKDNCSKDANDTLLLQLTNTSAYYMYLLLLLKSVVYFAIITCCLLRRTAFCCNGEKS

SEQ ID NO: 8110 - protein, 154 aa, Artificial Sequence
  Synthetic Polypeptide
AETKLQKAGTYLCLLEKFFPDVIKIHWQEKKSNTILGSQEGNTMKTNDTYMKFSWLTVPEKSLDKEHRCIVRHENNKNGVDQEIIFPPIKTDVITMDPKDNCSKDANDTLLLQLTNTSAYYMYLLLLLKSVVYFAIITCCLLRRTAFCCNGEKS

SEQ ID NO: 8111 - protein, 153 aa, Artificial Sequence
  Synthetic Polypeptide
ETKLQKAGTYLCLLEKFFPDVIKIHWQEKKSNTILGSQEGNTMKTNDTYMKFSWLTVPEKSLDKEHRCIVRHENNKNGVDQEIIFPPIKTDVITMDPKDNCSKDANDTLLLQLTNTSAYYMYLLLLLKSVVYFAIITCCLLRRTAFCCNGEKS

SEQ ID NO: 8112 - protein, 152 aa, Artificial Sequence
  Synthetic Polypeptide
TKLQKAGTYLCLLEKFFPDVIKIHWQEKKSNTILGSQEGNTMKTNDTYMKFSWLTVPEKSLDKEHRCIVRHENNKNGVDQEIIFPPIKTDVITMDPKDNCSKDANDTLLLQLTNTSAYYMYLLLLLKSVVYFAIITCCLLRRTAFCCNGEKS

SEQ ID NO: 8113 - protein, 151 aa, Artificial Sequence
  Synthetic Polypeptide
KLQKAGTYLCLLEKFFPDVIKIHWQEKKSNTILGSQEGNTMKTNDTYMKFSWLTVPEKSLDKEHRCIVRHENNKNGVDQEIIFPPIKTDVITMDPKDNCSKDANDTLLLQLTNTSAYYMYLLLLLKSVVYFAIITCCLLRRTAFCCNGEKS

SEQ ID NO: 8114 - protein, 150 aa, Artificial Sequence
  Synthetic Polypeptide
LQKAGTYLCLLEKFFPDVIKIHWQEKKSNTILGSQEGNTMKTNDTYMKFSWLTVPEKSLDKEHRCIVRHENNKNGVDQEIIFPPIKTDVITMDPKDNCSKDANDTLLLQLTNTSAYYMYLLLLLKSVVYFAIITCCLLRRTAFCCNGEKS

SEQ ID NO: 8115 - protein, 149 aa, Artificial Sequence
  Synthetic Polypeptide
QKAGTYLCLLEKFFPDVIKIHWQEKKSNTILGSQEGNTMKTNDTYMKFSWLTVPEKSLDKEHRCIVRHENNKNGVDQEIIFPPIKTDVITMDPKDNCSKDANDTLLLQLTNTSAYYMYLLLLLKSVVYFAIITCCLLRRTAFCCNGEKS

SEQ ID NO: 8116 - protein, 148 aa, Artificial Sequence
  Synthetic Polypeptide
KAGTYLCLLEKFFPDVIKIHWQEKKSNTILGSQEGNTMKTNDTYMKFSWLTVPEKSLDKEHRCIVRHENNKNGVDQEIIFPPIKTDVITMDPKDNCSKDANDTLLLQLTNTSAYYMYLLLLLKSVVYFAIITCCLLRRTAFCCNGEKS

SEQ ID NO: 8117 - protein, 147 aa, Artificial Sequence
  Synthetic Polypeptide
AGTYLCLLEKFFPDVIKIHWQEKKSNTILGSQEGNTMKTNDTYMKFSWLTVPEKSLDKEHRCIVRHENNKNGVDQEIIFPPIKTDVITMDPKDNCSKDANDTLLLQLTNTSAYYMYLLLLLKSVVYFAIITCCLLRRTAFCCNGEKS

SEQ ID NO: 8118 - protein, 146 aa, Artificial Sequence
  Synthetic Polypeptide
GTYLCLLEKFFPDVIKIHWQEKKSNTILGSQEGNTMKTNDTYMKFSWLTVPEKSLDKEHRCIVRHENNKNGVDQEIIFPPIKTDVITMDPKDNCSKDANDTLLLQLTNTSAYYMYLLLLLKSVVYFAIITCCLLRRTAFCCNGEKS

SEQ ID NO: 8119 - protein, 145 aa, Artificial Sequence
  Synthetic Polypeptide
TYLCLLEKFFPDVIKIHWQEKKSNTILGSQEGNTMKTNDTYMKFSWLTVPEKSLDKEHRCIVRHENNKNGVDQEIIFPPIKTDVITMDPKDNCSKDANDTLLLQLTNTSAYYMYLLLLLKSVVYFAIITCCLLRRTAFCCNGEKS

SEQ ID NO: 8120 - protein, 144 aa, Artificial Sequence
  Synthetic Polypeptide
YLCLLEKFFPDVIKIHWQEKKSNTILGSQEGNTMKTNDTYMKFSWLTVPEKSLDKEHRCIVRHENNKNGVDQEIIFPPIKTDVITMDPKDNCSKDANDTLLLQLTNTSAYYMYLLLLLKSVVYFAIITCCLLRRTAFCCNGEKS

SEQ ID NO: 8121 - protein, 143 aa, Artificial Sequence
  Synthetic Polypeptide
LCLLEKFFPDVIKIHWQEKKSNTILGSQEGNTMKTNDTYMKFSWLTVPEKSLDKEHRCIVRHENNKNGVDQEIIFPPIKTDVITMDPKDNCSKDANDTLLLQLTNTSAYYMYLLLLLKSVVYFAIITCCLLRRTAFCCNGEKS

SEQ ID NO: 8122 - protein, 142 aa, Artificial Sequence
  Synthetic Polypeptide
CLLEKFFPDVIKIHWQEKKSNTILGSQEGNTMKTNDTYMKFSWLTVPEKSLDKEHRCIVRHENNKNGVDQEIIFPPIKTDVITMDPKDNCSKDANDTLLLQLTNTSAYYMYLLLLLKSVVYFAIITCCLLRRTAFCCNGEKS

SEQ ID NO: 8123 - protein, 141 aa, Artificial Sequence
  Synthetic Polypeptide
LLEKFFPDVIKIHWQEKKSNTILGSQEGNTMKTNDTYMKFSWLTVPEKSLDKEHRCIVRHENNKNGVDQEIIFPPIKTDVITMDPKDNCSKDANDTLLLQLTNTSAYYMYLLLLLKSVVYFAIITCCLLRRTAFCCNGEKS

SEQ ID NO: 8124 - protein, 140 aa, Artificial Sequence
  Synthetic Polypeptide
LEKFFPDVIKIHWQEKKSNTILGSQEGNTMKTNDTYMKFSWLTVPEKSLDKEHRCIVRHENNKNGVDQEIIFPPIKTDVITMDPKDNCSKDANDTLLLQLTNTSAYYMYLLLLLKSVVYFAIITCCLLRRTAFCCNGEKS

SEQ ID NO: 8125 - protein, 139 aa, Artificial Sequence
  Synthetic Polypeptide
EKFFPDVIKIHWQEKKSNTILGSQEGNTMKTNDTYMKFSWLTVPEKSLDKEHRCIVRHENNKNGVDQEIIFPPIKTDVITMDPKDNCSKDANDTLLLQLTNTSAYYMYLLLLLKSVVYFAIITCCLLRRTAFCCNGEKS

SEQ ID NO: 8126 - protein, 138 aa, Artificial Sequence
  Synthetic Polypeptide
KFFPDVIKIHWQEKKSNTILGSQEGNTMKTNDTYMKFSWLTVPEKSLDKEHRCIVRHENNKNGVDQEIIFPPIKTDVITMDPKDNCSKDANDTLLLQLTNTSAYYMYLLLLLKSVVYFAIITCCLLRRTAFCCNGEKS

SEQ ID NO: 8127 - protein, 137 aa, Artificial Sequence
  Synthetic Polypeptide
FFPDVIKIHWQEKKSNTILGSQEGNTMKTNDTYMKFSWLTVPEKSLDKEHRCIVRHENNKNGVDQEIIFPPIKTDVITMDPKDNCSKDANDTLLLQLTNTSAYYMYLLLLLKSVVYFAIITCCLLRRTAFCCNGEKS

SEQ ID NO: 8128 - protein, 136 aa, Artificial Sequence
  Synthetic Polypeptide
FPDVIKIHWQEKKSNTILGSQEGNTMKTNDTYMKFSWLTVPEKSLDKEHRCIVRHENNKNGVDQEIIFPPIKTDVITMDPKDNCSKDANDTLLLQLTNTSAYYMYLLLLLKSVVYFAIITCCLLRRTAFCCNGEKS

SEQ ID NO: 8129 - protein, 135 aa, Artificial Sequence
  Synthetic Polypeptide
PDVIKIHWQEKKSNTILGSQEGNTMKTNDTYMKFSWLTVPEKSLDKEHRCIVRHENNKNGVDQEIIFPPIKTDVITMDPKDNCSKDANDTLLLQLTNTSAYYMYLLLLLKSVVYFAIITCCLLRRTAFCCNGEKS

SEQ ID NO: 8130 - protein, 134 aa, Artificial Sequence
  Synthetic Polypeptide
DVIKIHWQEKKSNTILGSQEGNTMKTNDTYMKFSWLTVPEKSLDKEHRCIVRHENNKNGVDQEIIFPPIKTDVITMDPKDNCSKDANDTLLLQLTNTSAYYMYLLLLLKSVVYFAIITCCLLRRTAFCCNGEKS

SEQ ID NO: 8131 - protein, 133 aa, Artificial Sequence
  Synthetic Polypeptide
VIKIHWQEKKSNTILGSQEGNTMKTNDTYMKFSWLTVPEKSLDKEHRCIVRHENNKNGVDQEIIFPPIKTDVITMDPKDNCSKDANDTLLLQLTNTSAYYMYLLLLLKSVVYFAIITCCLLRRTAFCCNGEKS

SEQ ID NO: 8132 - protein, 132 aa, Artificial Sequence
  Synthetic Polypeptide
IKIHWQEKKSNTILGSQEGNTMKTNDTYMKFSWLTVPEKSLDKEHRCIVRHENNKNGVDQEIIFPPIKTDVITMDPKDNCSKDANDTLLLQLTNTSAYYMYLLLLLKSVVYFAIITCCLLRRTAFCCNGEKS

SEQ ID NO: 8133 - protein, 131 aa, Artificial Sequence
  Synthetic Polypeptide
KIHWQEKKSNTILGSQEGNTMKTNDTYMKFSWLTVPEKSLDKEHRCIVRHENNKNGVDQEIIFPPIKTDVITMDPKDNCSKDANDTLLLQLTNTSAYYMYLLLLLKSVVYFAIITCCLLRRTAFCCNGEKS

SEQ ID NO: 8134 - protein, 130 aa, Artificial Sequence
  Synthetic Polypeptide
IHWQEKKSNTILGSQEGNTMKTNDTYMKFSWLTVPEKSLDKEHRCIVRHENNKNGVDQEIIFPPIKTDVITMDPKDNCSKDANDTLLLQLTNTSAYYMYLLLLLKSVVYFAIITCCLLRRTAFCCNGEKS

SEQ ID NO: 8135 - protein, 129 aa, Artificial Sequence
  Synthetic Polypeptide
HWQEKKSNTILGSQEGNTMKTNDTYMKFSWLTVPEKSLDKEHRCIVRHENNKNGVDQEIIFPPIKTDVITMDPKDNCSKDANDTLLLQLTNTSAYYMYLLLLLKSVVYFAIITCCLLRRTAFCCNGEKS

SEQ ID NO: 8136 - protein, 128 aa, Artificial Sequence
  Synthetic Polypeptide
WQEKKSNTILGSQEGNTMKTNDTYMKFSWLTVPEKSLDKEHRCIVRHENNKNGVDQEIIFPPIKTDVITMDPKDNCSKDANDTLLLQLTNTSAYYMYLLLLLKSVVYFAIITCCLLRRTAFCCNGEKS

SEQ ID NO: 8137 - protein, 127 aa, Artificial Sequence
  Synthetic Polypeptide
QEKKSNTILGSQEGNTMKTNDTYMKFSWLTVPEKSLDKEHRCIVRHENNKNGVDQEIIFPPIKTDVITMDPKDNCSKDANDTLLLQLTNTSAYYMYLLLLLKSVVYFAIITCCLLRRTAFCCNGEKS

SEQ ID NO: 8138 - protein, 126 aa, Artificial Sequence
  Synthetic Polypeptide
EKKSNTILGSQEGNTMKTNDTYMKFSWLTVPEKSLDKEHRCIVRHENNKNGVDQEIIFPPIKTDVITMDPKDNCSKDANDTLLLQLTNTSAYYMYLLLLLKSVVYFAIITCCLLRRTAFCCNGEKS

SEQ ID NO: 8139 - protein, 125 aa, Artificial Sequence
  Synthetic Polypeptide
KKSNTILGSQEGNTMKTNDTYMKFSWLTVPEKSLDKEHRCIVRHENNKNGVDQEIIFPPIKTDVITMDPKDNCSKDANDTLLLQLTNTSAYYMYLLLLLKSVVYFAIITCCLLRRTAFCCNGEKS

SEQ ID NO: 8140 - protein, 124 aa, Artificial Sequence
  Synthetic Polypeptide
KSNTILGSQEGNTMKTNDTYMKFSWLTVPEKSLDKEHRCIVRHENNKNGVDQEIIFPPIKTDVITMDPKDNCSKDANDTLLLQLTNTSAYYMYLLLLLKSVVYFAIITCCLLRRTAFCCNGEKS

SEQ ID NO: 8141 - protein, 123 aa, Artificial Sequence
  Synthetic Polypeptide
SNTILGSQEGNTMKTNDTYMKFSWLTVPEKSLDKEHRCIVRHENNKNGVDQEIIFPPIKTDVITMDPKDNCSKDANDTLLLQLTNTSAYYMYLLLLLKSVVYFAIITCCLLRRTAFCCNGEKS

SEQ ID NO: 8142 - protein, 122 aa, Artificial Sequence
  Synthetic Polypeptide
NTILGSQEGNTMKTNDTYMKFSWLTVPEKSLDKEHRCIVRHENNKNGVDQEIIFPPIKTDVITMDPKDNCSKDANDTLLLQLTNTSAYYMYLLLLLKSVVYFAIITCCLLRRTAFCCNGEKS

SEQ ID NO: 8143 - protein, 121 aa, Artificial Sequence
  Synthetic Polypeptide
TILGSQEGNTMKTNDTYMKFSWLTVPEKSLDKEHRCIVRHENNKNGVDQEIIFPPIKTDVITMDPKDNCSKDANDTLLLQLTNTSAYYMYLLLLLKSVVYFAIITCCLLRRTAFCCNGEKS

SEQ ID NO: 8144 - protein, 120 aa, Artificial Sequence
  Synthetic Polypeptide
ILGSQEGNTMKTNDTYMKFSWLTVPEKSLDKEHRCIVRHENNKNGVDQEIIFPPIKTDVITMDPKDNCSKDANDTLLLQLTNTSAYYMYLLLLLKSVVYFAIITCCLLRRTAFCCNGEKS

SEQ ID NO: 8145 - protein, 119 aa, Artificial Sequence
  Synthetic Polypeptide
LGSQEGNTMKTNDTYMKFSWLTVPEKSLDKEHRCIVRHENNKNGVDQEIIFPPIKTDVITMDPKDNCSKDANDTLLLQLTNTSAYYMYLLLLLKSVVYFAIITCCLLRRTAFCCNGEKS

SEQ ID NO: 8146 - protein, 118 aa, Artificial Sequence
  Synthetic Polypeptide
GSQEGNTMKTNDTYMKFSWLTVPEKSLDKEHRCIVRHENNKNGVDQEIIFPPIKTDVITMDPKDNCSKDANDTLLLQLTNTSAYYMYLLLLLKSVVYFAIITCCLLRRTAFCCNGEKS

SEQ ID NO: 8147 - protein, 117 aa, Artificial Sequence
  Synthetic Polypeptide
SQEGNTMKTNDTYMKFSWLTVPEKSLDKEHRCIVRHENNKNGVDQEIIFPPIKTDVITMDPKDNCSKDANDTLLLQLTNTSAYYMYLLLLLKSVVYFAIITCCLLRRTAFCCNGEKS

SEQ ID NO: 8148 - protein, 116 aa, Artificial Sequence
  Synthetic Polypeptide
QEGNTMKTNDTYMKFSWLTVPEKSLDKEHRCIVRHENNKNGVDQEIIFPPIKTDVITMDPKDNCSKDANDTLLLQLTNTSAYYMYLLLLLKSVVYFAIITCCLLRRTAFCCNGEKS

SEQ ID NO: 8149 - protein, 115 aa, Artificial Sequence
  Synthetic Polypeptide
EGNTMKTNDTYMKFSWLTVPEKSLDKEHRCIVRHENNKNGVDQEIIFPPIKTDVITMDPKDNCSKDANDTLLLQLTNTSAYYMYLLLLLKSVVYFAIITCCLLRRTAFCCNGEKS

SEQ ID NO: 8150 - protein, 114 aa, Artificial Sequence
  Synthetic Polypeptide
GNTMKTNDTYMKFSWLTVPEKSLDKEHRCIVRHENNKNGVDQEIIFPPIKTDVITMDPKDNCSKDANDTLLLQLTNTSAYYMYLLLLLKSVVYFAIITCCLLRRTAFCCNGEKS

SEQ ID NO: 8151 - protein, 113 aa, Artificial Sequence
  Synthetic Polypeptide
NTMKTNDTYMKFSWLTVPEKSLDKEHRCIVRHENNKNGVDQEIIFPPIKTDVITMDPKDNCSKDANDTLLLQLTNTSAYYMYLLLLLKSVVYFAIITCCLLRRTAFCCNGEKS

SEQ ID NO: 8152 - protein, 112 aa, Artificial Sequence
  Synthetic Polypeptide
TMKTNDTYMKFSWLTVPEKSLDKEHRCIVRHENNKNGVDQEIIFPPIKTDVITMDPKDNCSKDANDTLLLQLTNTSAYYMYLLLLLKSVVYFAIITCCLLRRTAFCCNGEKS

SEQ ID NO: 8153 - protein, 111 aa, Artificial Sequence
  Synthetic Polypeptide
MKTNDTYMKFSWLTVPEKSLDKEHRCIVRHENNKNGVDQEIIFPPIKTDVITMDPKDNCSKDANDTLLLQLTNTSAYYMYLLLLLKSVVYFAIITCCLLRRTAFCCNGEKS

SEQ ID NO: 8154 - protein, 110 aa, Artificial Sequence
  Synthetic Polypeptide
KTNDTYMKFSWLTVPEKSLDKEHRCIVRHENNKNGVDQEIIFPPIKTDVITMDPKDNCSKDANDTLLLQLTNTSAYYMYLLLLLKSVVYFAIITCCLLRRTAFCCNGEKS

SEQ ID NO: 8155 - protein, 109 aa, Artificial Sequence
  Synthetic Polypeptide
TNDTYMKFSWLTVPEKSLDKEHRCIVRHENNKNGVDQEIIFPPIKTDVITMDPKDNCSKDANDTLLLQLTNTSAYYMYLLLLLKSVVYFAIITCCLLRRTAFCCNGEKS

SEQ ID NO: 8156 - protein, 108 aa, Artificial Sequence
  Synthetic Polypeptide
NDTYMKFSWLTVPEKSLDKEHRCIVRHENNKNGVDQEIIFPPIKTDVITMDPKDNCSKDANDTLLLQLTNTSAYYMYLLLLLKSVVYFAIITCCLLRRTAFCCNGEKS

SEQ ID NO: 8157 - protein, 107 aa, Artificial Sequence
  Synthetic Polypeptide
DTYMKFSWLTVPEKSLDKEHRCIVRHENNKNGVDQEIIFPPIKTDVITMDPKDNCSKDANDTLLLQLTNTSAYYMYLLLLLKSVVYFAIITCCLLRRTAFCCNGEKS

SEQ ID NO: 8158 - protein, 106 aa, Artificial Sequence
  Synthetic Polypeptide
TYMKFSWLTVPEKSLDKEHRCIVRHENNKNGVDQEIIFPPIKTDVITMDPKDNCSKDANDTLLLQLTNTSAYYMYLLLLLKSVVYFAIITCCLLRRTAFCCNGEKS

SEQ ID NO: 8159 - protein, 105 aa, Artificial Sequence
  Synthetic Polypeptide
YMKFSWLTVPEKSLDKEHRCIVRHENNKNGVDQEIIFPPIKTDVITMDPKDNCSKDANDTLLLQLTNTSAYYMYLLLLLKSVVYFAIITCCLLRRTAFCCNGEKS

SEQ ID NO: 8160 - protein, 104 aa, Artificial Sequence
  Synthetic Polypeptide
MKFSWLTVPEKSLDKEHRCIVRHENNKNGVDQEIIFPPIKTDVITMDPKDNCSKDANDTLLLQLTNTSAYYMYLLLLLKSVVYFAIITCCLLRRTAFCCNGEKS

SEQ ID NO: 8161 - protein, 103 aa, Artificial Sequence
  Synthetic Polypeptide
KFSWLTVPEKSLDKEHRCIVRHENNKNGVDQEIIFPPIKTDVITMDPKDNCSKDANDTLLLQLTNTSAYYMYLLLLLKSVVYFAIITCCLLRRTAFCCNGEKS

SEQ ID NO: 8162 - protein, 102 aa, Artificial Sequence
  Synthetic Polypeptide
FSWLTVPEKSLDKEHRCIVRHENNKNGVDQEIIFPPIKTDVITMDPKDNCSKDANDTLLLQLTNTSAYYMYLLLLLKSVVYFAIITCCLLRRTAFCCNGEKS

SEQ ID NO: 8163 - protein, 101 aa, Artificial Sequence
  Synthetic Polypeptide
SWLTVPEKSLDKEHRCIVRHENNKNGVDQEIIFPPIKTDVITMDPKDNCSKDANDTLLLQLTNTSAYYMYLLLLLKSVVYFAIITCCLLRRTAFCCNGEKS

SEQ ID NO: 8164 - protein, 100 aa, Artificial Sequence
  Synthetic Polypeptide
WLTVPEKSLDKEHRCIVRHENNKNGVDQEIIFPPIKTDVITMDPKDNCSKDANDTLLLQLTNTSAYYMYLLLLLKSVVYFAIITCCLLRRTAFCCNGEKS

SEQ ID NO: 8165 - protein, 99 aa, Artificial Sequence
  Synthetic Polypeptide
LTVPEKSLDKEHRCIVRHENNKNGVDQEIIFPPIKTDVITMDPKDNCSKDANDTLLLQLTNTSAYYMYLLLLLKSVVYFAIITCCLLRRTAFCCNGEKS

SEQ ID NO: 8166 - protein, 98 aa, Artificial Sequence
  Synthetic Polypeptide
TVPEKSLDKEHRCIVRHENNKNGVDQEIIFPPIKTDVITMDPKDNCSKDANDTLLLQLTNTSAYYMYLLLLLKSVVYFAIITCCLLRRTAFCCNGEKS

SEQ ID NO: 8167 - protein, 97 aa, Artificial Sequence
  Synthetic Polypeptide
VPEKSLDKEHRCIVRHENNKNGVDQEIIFPPIKTDVITMDPKDNCSKDANDTLLLQLTNTSAYYMYLLLLLKSVVYFAIITCCLLRRTAFCCNGEKS

SEQ ID NO: 8168 - protein, 96 aa, Artificial Sequence
  Synthetic Polypeptide
PEKSLDKEHRCIVRHENNKNGVDQEIIFPPIKTDVITMDPKDNCSKDANDTLLLQLTNTSAYYMYLLLLLKSVVYFAIITCCLLRRTAFCCNGEKS

SEQ ID NO: 8169 - protein, 95 aa, Artificial Sequence
  Synthetic Polypeptide
EKSLDKEHRCIVRHENNKNGVDQEIIFPPIKTDVITMDPKDNCSKDANDTLLLQLTNTSAYYMYLLLLLKSVVYFAIITCCLLRRTAFCCNGEKS

SEQ ID NO: 8170 - protein, 94 aa, Artificial Sequence
  Synthetic Polypeptide
KSLDKEHRCIVRHENNKNGVDQEIIFPPIKTDVITMDPKDNCSKDANDTLLLQLTNTSAYYMYLLLLLKSVVYFAIITCCLLRRTAFCCNGEKS

SEQ ID NO: 8171 - protein, 93 aa, Artificial Sequence
  Synthetic Polypeptide
SLDKEHRCIVRHENNKNGVDQEIIFPPIKTDVITMDPKDNCSKDANDTLLLQLTNTSAYYMYLLLLLKSVVYFAIITCCLLRRTAFCCNGEKS

SEQ ID NO: 8172 - protein, 92 aa, Artificial Sequence
  Synthetic Polypeptide
LDKEHRCIVRHENNKNGVDQEIIFPPIKTDVITMDPKDNCSKDANDTLLLQLTNTSAYYMYLLLLLKSVVYFAIITCCLLRRTAFCCNGEKS

SEQ ID NO: 8173 - protein, 91 aa, Artificial Sequence
  Synthetic Polypeptide
DKEHRCIVRHENNKNGVDQEIIFPPIKTDVITMDPKDNCSKDANDTLLLQLTNTSAYYMYLLLLLKSVVYFAIITCCLLRRTAFCCNGEKS

SEQ ID NO: 8174 - protein, 90 aa, Artificial Sequence
  Synthetic Polypeptide
KEHRCIVRHENNKNGVDQEIIFPPIKTDVITMDPKDNCSKDANDTLLLQLTNTSAYYMYLLLLLKSVVYFAIITCCLLRRTAFCCNGEKS

SEQ ID NO: 8175 - protein, 89 aa, Artificial Sequence
  Synthetic Polypeptide
EHRCIVRHENNKNGVDQEIIFPPIKTDVITMDPKDNCSKDANDTLLLQLTNTSAYYMYLLLLLKSVVYFAIITCCLLRRTAFCCNGEKS

SEQ ID NO: 8176 - protein, 88 aa, Artificial Sequence
  Synthetic Polypeptide
HRCIVRHENNKNGVDQEIIFPPIKTDVITMDPKDNCSKDANDTLLLQLTNTSAYYMYLLLLLKSVVYFAIITCCLLRRTAFCCNGEKS

SEQ ID NO: 8177 - protein, 87 aa, Artificial Sequence
  Synthetic Polypeptide
RCIVRHENNKNGVDQEIIFPPIKTDVITMDPKDNCSKDANDTLLLQLTNTSAYYMYLLLLLKSVVYFAIITCCLLRRTAFCCNGEKS

SEQ ID NO: 8178 - protein, 86 aa, Artificial Sequence
  Synthetic Polypeptide
CIVRHENNKNGVDQEIIFPPIKTDVITMDPKDNCSKDANDTLLLQLTNTSAYYMYLLLLLKSVVYFAIITCCLLRRTAFCCNGEKS

SEQ ID NO: 8179 - protein, 85 aa, Artificial Sequence
  Synthetic Polypeptide
IVRHENNKNGVDQEIIFPPIKTDVITMDPKDNCSKDANDTLLLQLTNTSAYYMYLLLLLKSVVYFAIITCCLLRRTAFCCNGEKS

SEQ ID NO: 8180 - protein, 84 aa, Artificial Sequence
  Synthetic Polypeptide
VRHENNKNGVDQEIIFPPIKTDVITMDPKDNCSKDANDTLLLQLTNTSAYYMYLLLLLKSVVYFAIITCCLLRRTAFCCNGEKS

SEQ ID NO: 8181 - protein, 83 aa, Artificial Sequence
  Synthetic Polypeptide
RHENNKNGVDQEIIFPPIKTDVITMDPKDNCSKDANDTLLLQLTNTSAYYMYLLLLLKSVVYFAIITCCLLRRTAFCCNGEKS

SEQ ID NO: 8182 - protein, 82 aa, Artificial Sequence
  Synthetic Polypeptide
HENNKNGVDQEIIFPPIKTDVITMDPKDNCSKDANDTLLLQLTNTSAYYMYLLLLLKSVVYFAIITCCLLRRTAFCCNGEKS

SEQ ID NO: 8183 - protein, 81 aa, Artificial Sequence
  Synthetic Polypeptide
ENNKNGVDQEIIFPPIKTDVITMDPKDNCSKDANDTLLLQLTNTSAYYMYLLLLLKSVVYFAIITCCLLRRTAFCCNGEKS

SEQ ID NO: 8184 - protein, 80 aa, Artificial Sequence
  Synthetic Polypeptide
NNKNGVDQEIIFPPIKTDVITMDPKDNCSKDANDTLLLQLTNTSAYYMYLLLLLKSVVYFAIITCCLLRRTAFCCNGEKS

SEQ ID NO: 8185 - protein, 79 aa, Artificial Sequence
  Synthetic Polypeptide
NKNGVDQEIIFPPIKTDVITMDPKDNCSKDANDTLLLQLTNTSAYYMYLLLLLKSVVYFAIITCCLLRRTAFCCNGEKS

SEQ ID NO: 8186 - protein, 78 aa, Artificial Sequence
  Synthetic Polypeptide
KNGVDQEIIFPPIKTDVITMDPKDNCSKDANDTLLLQLTNTSAYYMYLLLLLKSVVYFAIITCCLLRRTAFCCNGEKS

SEQ ID NO: 8187 - protein, 77 aa, Artificial Sequence
  Synthetic Polypeptide
NGVDQEIIFPPIKTDVITMDPKDNCSKDANDTLLLQLTNTSAYYMYLLLLLKSVVYFAIITCCLLRRTAFCCNGEKS

SEQ ID NO: 8188 - protein, 76 aa, Artificial Sequence
  Synthetic Polypeptide
GVDQEIIFPPIKTDVITMDPKDNCSKDANDTLLLQLTNTSAYYMYLLLLLKSVVYFAIITCCLLRRTAFCCNGEKS

SEQ ID NO: 8189 - protein, 75 aa, Artificial Sequence
  Synthetic Polypeptide
VDQEIIFPPIKTDVITMDPKDNCSKDANDTLLLQLTNTSAYYMYLLLLLKSVVYFAIITCCLLRRTAFCCNGEKS

SEQ ID NO: 8190 - protein, 74 aa, Artificial Sequence
  Synthetic Polypeptide
DQEIIFPPIKTDVITMDPKDNCSKDANDTLLLQLTNTSAYYMYLLLLLKSVVYFAIITCCLLRRTAFCCNGEKS

SEQ ID NO: 8191 - protein, 73 aa, Artificial Sequence
  Synthetic Polypeptide
QEIIFPPIKTDVITMDPKDNCSKDANDTLLLQLTNTSAYYMYLLLLLKSVVYFAIITCCLLRRTAFCCNGEKS

SEQ ID NO: 8192 - protein, 153 aa, Artificial Sequence; identical to SEQ ID NO: 3477
  Synthetic Polypeptide

SEQ ID NO: 8193 - protein, 152 aa, Artificial Sequence
  Synthetic Polypeptide
QPHTKPSVFVMKNGTNVACLVKEFYPKDIRINLVSSKKITEFDPAIVISPSGKYNAVKLGKYEDSNSVTCSVQHDNKTVHSTDFEVKTDSTDHVKPKETENTKQPSKSCHKPKAIVHTEKVNMMSLTVLGLRMLFAKTVAVNFLLTAKLFFL

SEQ ID NO: 8194 - protein, 151 aa, Artificial Sequence; identical to SEQ ID NO: 3529
  Synthetic Polypeptide

SEQ ID NO: 8195 - protein, 150 aa, Artificial Sequence
  Synthetic Polypeptide
HTKPSVFVMKNGTNVACLVKEFYPKDIRINLVSSKKITEFDPAIVISPSGKYNAVKLGKYEDSNSVTCSVQHDNKTVHSTDFEVKTDSTDHVKPKETENTKQPSKSCHKPKAIVHTEKVNMMSLTVLGLRMLFAKTVAVNFLLTAKLFFL

SEQ ID NO: 8196 - protein, 149 aa, Artificial Sequence
  Synthetic Polypeptide
TKPSVFVMKNGTNVACLVKEFYPKDIRINLVSSKKITEFDPAIVISPSGKYNAVKLGKYEDSNSVTCSVQHDNKTVHSTDFEVKTDSTDHVKPKETENTKQPSKSCHKPKAIVHTEKVNMMSLTVLGLRMLFAKTVAVNFLLTAKLFFL

SEQ ID NO: 8197 - protein, 148 aa, Artificial Sequence
  Synthetic Polypeptide
KPSVFVMKNGTNVACLVKEFYPKDIRINLVSSKKITEFDPAIVISPSGKYNAVKLGKYEDSNSVTCSVQHDNKTVHSTDFEVKTDSTDHVKPKETENTKQPSKSCHKPKAIVHTEKVNMMSLTVLGLRMLFAKTVAVNFLLTAKLFFL

SEQ ID NO: 8198 - protein, 146 aa, Artificial Sequence
  Synthetic Polypeptide
SVFVMKNGTNVACLVKEFYPKDIRINLVSSKKITEFDPAIVISPSGKYNAVKLGKYEDSNSVTCSVQHDNKTVHSTDFEVKTDSTDHVKPKETENTKQPSKSCHKPKAIVHTEKVNMMSLTVLGLRMLFAKTVAVNFLLTAKLFFL

SEQ ID NO: 8199 - protein, 145 aa, Artificial Sequence; identical to SEQ ID NO: 3531
  Synthetic Polypeptide

SEQ ID NO: 8200 - protein, 144 aa, Artificial Sequence
  Synthetic Polypeptide
FVMKNGTNVACLVKEFYPKDIRINLVSSKKITEFDPAIVISPSGKYNAVKLGKYEDSNSVTCSVQHDNKTVHSTDFEVKTDSTDHVKPKETENTKQPSKSCHKPKAIVHTEKVNMMSLTVLGLRMLFAKTVAVNFLLTAKLFFL

SEQ ID NO: 8201 - protein, 143 aa, Artificial Sequence
  Synthetic Polypeptide
VMKNGTNVACLVKEFYPKDIRINLVSSKKITEFDPAIVISPSGKYNAVKLGKYEDSNSVTCSVQHDNKTVHSTDFEVKTDSTDHVKPKETENTKQPSKSCHKPKAIVHTEKVNMMSLTVLGLRMLFAKTVAVNFLLTAKLFFL

SEQ ID NO: 8202 - protein, 142 aa, Artificial Sequence
  Synthetic Polypeptide
MKNGTNVACLVKEFYPKDIRINLVSSKKITEFDPAIVISPSGKYNAVKLGKYEDSNSVTCSVQHDNKTVHSTDFEVKTDSTDHVKPKETENTKQPSKSCHKPKAIVHTEKVNMMSLTVLGLRMLFAKTVAVNFLLTAKLFFL

SEQ ID NO: 8203 - protein, 141 aa, Artificial Sequence
  Synthetic Polypeptide
KNGTNVACLVKEFYPKDIRINLVSSKKITEFDPAIVISPSGKYNAVKLGKYEDSNSVTCSVQHDNKTVHSTDFEVKTDSTDHVKPKETENTKQPSKSCHKPKAIVHTEKVNMMSLTVLGLRMLFAKTVAVNFLLTAKLFFL

SEQ ID NO: 8204 - protein, 140 aa, Artificial Sequence; identical to SEQ ID NO: 3532
  Synthetic Polypeptide

SEQ ID NO: 8205 - protein, 139 aa, Artificial Sequence
  Synthetic Polypeptide
GTNVACLVKEFYPKDIRINLVSSKKITEFDPAIVISPSGKYNAVKLGKYEDSNSVTCSVQHDNKTVHSTDFEVKTDSTDHVKPKETENTKQPSKSCHKPKAIVHTEKVNMMSLTVLGLRMLFAKTVAVNFLLTAKLFFL

SEQ ID NO: 8206 - protein, 138 aa, Artificial Sequence
  Synthetic Polypeptide
TNVACLVKEFYPKDIRINLVSSKKITEFDPAIVISPSGKYNAVKLGKYEDSNSVTCSVQHDNKTVHSTDFEVKTDSTDHVKPKETENTKQPSKSCHKPKAIVHTEKVNMMSLTVLGLRMLFAKTVAVNFLLTAKLFFL

SEQ ID NO: 8207 - protein, 137 aa, Artificial Sequence
  Synthetic Polypeptide
NVACLVKEFYPKDIRINLVSSKKITEFDPAIVISPSGKYNAVKLGKYEDSNSVTCSVQHDNKTVHSTDFEVKTDSTDHVKPKETENTKQPSKSCHKPKAIVHTEKVNMMSLTVLGLRMLFAKTVAVNFLLTAKLFFL

SEQ ID NO: 8208 - protein, 136 aa, Artificial Sequence
  Synthetic Polypeptide
VACLVKEFYPKDIRINLVSSKKITEFDPAIVISPSGKYNAVKLGKYEDSNSVTCSVQHDNKTVHSTDFEVKTDSTDHVKPKETENTKQPSKSCHKPKAIVHTEKVNMMSLTVLGLRMLFAKTVAVNFLLTAKLFFL

SEQ ID NO: 8209 - protein, 135 aa, Artificial Sequence
  Synthetic Polypeptide
ACLVKEFYPKDIRINLVSSKKITEFDPAIVISPSGKYNAVKLGKYEDSNSVTCSVQHDNKTVHSTDFEVKTDSTDHVKPKETENTKQPSKSCHKPKAIVHTEKVNMMSLTVLGLRMLFAKTVAVNFLLTAKLFFL

SEQ ID NO: 8210 - protein, 134 aa, Artificial Sequence
  Synthetic Polypeptide
CLVKEFYPKDIRINLVSSKKITEFDPAIVISPSGKYNAVKLGKYEDSNSVTCSVQHDNKTVHSTDFEVKTDSTDHVKPKETENTKQPSKSCHKPKAIVHTEKVNMMSLTVLGLRMLFAKTVAVNFLLTAKLFFL

SEQ ID NO: 8211 - protein, 133 aa, Artificial Sequence
  Synthetic Polypeptide
LVKEFYPKDIRINLVSSKKITEFDPAIVISPSGKYNAVKLGKYEDSNSVTCSVQHDNKTVHSTDFEVKTDSTDHVKPKETENTKQPSKSCHKPKAIVHTEKVNMMSLTVLGLRMLFAKTVAVNFLLTAKLFFL

SEQ ID NO: 8212 - protein, 132 aa, Artificial Sequence
  Synthetic Polypeptide
VKEFYPKDIRINLVSSKKITEFDPAIVISPSGKYNAVKLGKYEDSNSVTCSVQHDNKTVHSTDFEVKTDSTDHVKPKETENTKQPSKSCHKPKAIVHTEKVNMMSLTVLGLRMLFAKTVAVNFLLTAKLFFL

SEQ ID NO: 8213 - protein, 131 aa, Artificial Sequence
  Synthetic Polypeptide
KEFYPKDIRINLVSSKKITEFDPAIVISPSGKYNAVKLGKYEDSNSVTCSVQHDNKTVHSTDFEVKTDSTDHVKPKETENTKQPSKSCHKPKAIVHTEKVNMMSLTVLGLRMLFAKTVAVNFLLTAKLFFL

SEQ ID NO: 8214 - protein, 130 aa, Artificial Sequence
  Synthetic Polypeptide
EFYPKDIRINLVSSKKITEFDPAIVISPSGKYNAVKLGKYEDSNSVTCSVQHDNKTVHSTDFEVKTDSTDHVKPKETENTKQPSKSCHKPKAIVHTEKVNMMSLTVLGLRMLFAKTVAVNFLLTAKLFFL

SEQ ID NO: 8215 - protein, 129 aa, Artificial Sequence
  Synthetic Polypeptide
FYPKDIRINLVSSKKITEFDPAIVISPSGKYNAVKLGKYEDSNSVTCSVQHDNKTVHSTDFEVKTDSTDHVKPKETENTKQPSKSCHKPKAIVHTEKVNMMSLTVLGLRMLFAKTVAVNFLLTAKLFFL

SEQ ID NO: 8216 - protein, 128 aa, Artificial Sequence
  Synthetic Polypeptide
YPKDIRINLVSSKKITEFDPAIVISPSGKYNAVKLGKYEDSNSVTCSVQHDNKTVHSTDFEVKTDSTDHVKPKETENTKQPSKSCHKPKAIVHTEKVNMMSLTVLGLRMLFAKTVAVNFLLTAKLFFL

SEQ ID NO: 8217 - protein, 127 aa, Artificial Sequence
  Synthetic Polypeptide
PKDIRINLVSSKKITEFDPAIVISPSGKYNAVKLGKYEDSNSVTCSVQHDNKTVHSTDFEVKTDSTDHVKPKETENTKQPSKSCHKPKAIVHTEKVNMMSLTVLGLRMLFAKTVAVNFLLTAKLFFL

SEQ ID NO: 8218 - protein, 126 aa, Artificial Sequence
  Synthetic Polypeptide
KDIRINLVSSKKITEFDPAIVISPSGKYNAVKLGKYEDSNSVTCSVQHDNKTVHSTDFEVKTDSTDHVKPKETENTKQPSKSCHKPKAIVHTEKVNMMSLTVLGLRMLFAKTVAVNFLLTAKLFFL

SEQ ID NO: 8219 - protein, 125 aa, Artificial Sequence
  Synthetic Polypeptide
DIRINLVSSKKITEFDPAIVISPSGKYNAVKLGKYEDSNSVTCSVQHDNKTVHSTDFEVKTDSTDHVKPKETENTKQPSKSCHKPKAIVHTEKVNMMSLTVLGLRMLFAKTVAVNFLLTAKLFFL

SEQ ID NO: 8220 - protein, 124 aa, Artificial Sequence
  Synthetic Polypeptide
IRINLVSSKKITEFDPAIVISPSGKYNAVKLGKYEDSNSVTCSVQHDNKTVHSTDFEVKTDSTDHVKPKETENTKQPSKSCHKPKAIVHTEKVNMMSLTVLGLRMLFAKTVAVNFLLTAKLFFL

SEQ ID NO: 8221 - protein, 123 aa, Artificial Sequence
  Synthetic Polypeptide
RINLVSSKKITEFDPAIVISPSGKYNAVKLGKYEDSNSVTCSVQHDNKTVHSTDFEVKTDSTDHVKPKETENTKQPSKSCHKPKAIVHTEKVNMMSLTVLGLRMLFAKTVAVNFLLTAKLFFL

SEQ ID NO: 8222 - protein, 122 aa, Artificial Sequence
  Synthetic Polypeptide
INLVSSKKITEFDPAIVISPSGKYNAVKLGKYEDSNSVTCSVQHDNKTVHSTDFEVKTDSTDHVKPKETENTKQPSKSCHKPKAIVHTEKVNMMSLTVLGLRMLFAKTVAVNFLLTAKLFFL

SEQ ID NO: 8223 - protein, 121 aa, Artificial Sequence
  Synthetic Polypeptide
NLVSSKKITEFDPAIVISPSGKYNAVKLGKYEDSNSVTCSVQHDNKTVHSTDFEVKTDSTDHVKPKETENTKQPSKSCHKPKAIVHTEKVNMMSLTVLGLRMLFAKTVAVNFLLTAKLFFL

SEQ ID NO: 8224 - protein, 120 aa, Artificial Sequence
  Synthetic Polypeptide
LVSSKKITEFDPAIVISPSGKYNAVKLGKYEDSNSVTCSVQHDNKTVHSTDFEVKTDSTDHVKPKETENTKQPSKSCHKPKAIVHTEKVNMMSLTVLGLRMLFAKTVAVNFLLTAKLFFL

SEQ ID NO: 8225 - protein, 119 aa, Artificial Sequence
  Synthetic Polypeptide
VSSKKITEFDPAIVISPSGKYNAVKLGKYEDSNSVTCSVQHDNKTVHSTDFEVKTDSTDHVKPKETENTKQPSKSCHKPKAIVHTEKVNMMSLTVLGLRMLFAKTVAVNFLLTAKLFFL

SEQ ID NO: 8226 - protein, 118 aa, Artificial Sequence
  Synthetic Polypeptide
SSKKITEFDPAIVISPSGKYNAVKLGKYEDSNSVTCSVQHDNKTVHSTDFEVKTDSTDHVKPKETENTKQPSKSCHKPKAIVHTEKVNMMSLTVLGLRMLFAKTVAVNFLLTAKLFFL

SEQ ID NO: 8227 - protein, 117 aa, Artificial Sequence
  Synthetic Polypeptide
SKKITEFDPAIVISPSGKYNAVKLGKYEDSNSVTCSVQHDNKTVHSTDFEVKTDSTDHVKPKETENTKQPSKSCHKPKAIVHTEKVNMMSLTVLGLRMLFAKTVAVNFLLTAKLFFL

SEQ ID NO: 8228 - protein, 116 aa, Artificial Sequence
  Synthetic Polypeptide
KKITEFDPAIVISPSGKYNAVKLGKYEDSNSVTCSVQHDNKTVHSTDFEVKTDSTDHVKPKETENTKQPSKSCHKPKAIVHTEKVNMMSLTVLGLRMLFAKTVAVNFLLTAKLFFL

SEQ ID NO: 8229 - protein, 115 aa, Artificial Sequence
  Synthetic Polypeptide
KITEFDPAIVISPSGKYNAVKLGKYEDSNSVTCSVQHDNKTVHSTDFEVKTDSTDHVKPKETENTKQPSKSCHKPKAIVHTEKVNMMSLTVLGLRMLFAKTVAVNFLLTAKLFFL

SEQ ID NO: 8230 - protein, 114 aa, Artificial Sequence
  Synthetic Polypeptide
ITEFDPAIVISPSGKYNAVKLGKYEDSNSVTCSVQHDNKTVHSTDFEVKTDSTDHVKPKETENTKQPSKSCHKPKAIVHTEKVNMMSLTVLGLRMLFAKTVAVNFLLTAKLFFL

SEQ ID NO: 8231 - protein, 113 aa, Artificial Sequence
  Synthetic Polypeptide
TEFDPAIVISPSGKYNAVKLGKYEDSNSVTCSVQHDNKTVHSTDFEVKTDSTDHVKPKETENTKQPSKSCHKPKAIVHTEKVNMMSLTVLGLRMLFAKTVAVNFLLTAKLFFL

SEQ ID NO: 8232 - protein, 112 aa, Artificial Sequence
  Synthetic Polypeptide
EFDPAIVISPSGKYNAVKLGKYEDSNSVTCSVQHDNKTVHSTDFEVKTDSTDHVKPKETENTKQPSKSCHKPKAIVHTEKVNMMSLTVLGLRMLFAKTVAVNFLLTAKLFFL

SEQ ID NO: 8233 - protein, 111 aa, Artificial Sequence
  Synthetic Polypeptide
FDPAIVISPSGKYNAVKLGKYEDSNSVTCSVQHDNKTVHSTDFEVKTDSTDHVKPKETENTKQPSKSCHKPKAIVHTEKVNMMSLTVLGLRMLFAKTVAVNFLLTAKLFFL

SEQ ID NO: 8234 - protein, 110 aa, Artificial Sequence
  Synthetic Polypeptide
DPAIVISPSGKYNAVKLGKYEDSNSVTCSVQHDNKTVHSTDFEVKTDSTDHVKPKETENTKQPSKSCHKPKAIVHTEKVNMMSLTVLGLRMLFAKTVAVNFLLTAKLFFL

SEQ ID NO: 8235 - protein, 109 aa, Artificial Sequence
  Synthetic Polypeptide
PAIVISPSGKYNAVKLGKYEDSNSVTCSVQHDNKTVHSTDFEVKTDSTDHVKPKETENTKQPSKSCHKPKAIVHTEKVNMMSLTVLGLRMLFAKTVAVNFLLTAKLFFL

SEQ ID NO: 8236 - protein, 108 aa, Artificial Sequence
  Synthetic Polypeptide
AIVISPSGKYNAVKLGKYEDSNSVTCSVQHDNKTVHSTDFEVKTDSTDHVKPKETENTKQPSKSCHKPKAIVHTEKVNMMSLTVLGLRMLFAKTVAVNFLLTAKLFFL

SEQ ID NO: 8237 - protein, 107 aa, Artificial Sequence
  Synthetic Polypeptide
IVISPSGKYNAVKLGKYEDSNSVTCSVQHDNKTVHSTDFEVKTDSTDHVKPKETENTKQPSKSCHKPKAIVHTEKVNMMSLTVLGLRMLFAKTVAVNFLLTAKLFFL

SEQ ID NO: 8238 - protein, 106 aa, Artificial Sequence
  Synthetic Polypeptide
VISPSGKYNAVKLGKYEDSNSVTCSVQHDNKTVHSTDFEVKTDSTDHVKPKETENTKQPSKSCHKPKAIVHTEKVNMMSLTVLGLRMLFAKTVAVNFLLTAKLFFL

SEQ ID NO: 8239 - protein, 105 aa, Artificial Sequence
  Synthetic Polypeptide
ISPSGKYNAVKLGKYEDSNSVTCSVQHDNKTVHSTDFEVKTDSTDHVKPKETENTKQPSKSCHKPKAIVHTEKVNMMSLTVLGLRMLFAKTVAVNFLLTAKLFFL

SEQ ID NO: 8240 - protein, 104 aa, Artificial Sequence
  Synthetic Polypeptide
SPSGKYNAVKLGKYEDSNSVTCSVQHDNKTVHSTDFEVKTDSTDHVKPKETENTKQPSKSCHKPKAIVHTEKVNMMSLTVLGLRMLFAKTVAVNFLLTAKLFFL

SEQ ID NO: 8241 - protein, 103 aa, Artificial Sequence
  Synthetic Polypeptide
PSGKYNAVKLGKYEDSNSVTCSVQHDNKTVHSTDFEVKTDSTDHVKPKETENTKQPSKSCHKPKAIVHTEKVNMMSLTVLGLRMLFAKTVAVNFLLTAKLFFL

SEQ ID NO: 8242 - protein, 102 aa, Artificial Sequence
  Synthetic Polypeptide
SGKYNAVKLGKYEDSNSVTCSVQHDNKTVHSTDFEVKTDSTDHVKPKETENTKQPSKSCHKPKAIVHTEKVNMMSLTVLGLRMLFAKTVAVNFLLTAKLFFL

SEQ ID NO: 8243 - protein, 101 aa, Artificial Sequence
  Synthetic Polypeptide
GKYNAVKLGKYEDSNSVTCSVQHDNKTVHSTDFEVKTDSTDHVKPKETENTKQPSKSCHKPKAIVHTEKVNMMSLTVLGLRMLFAKTVAVNFLLTAKLFFL

SEQ ID NO: 8244 - protein, 100 aa, Artificial Sequence
  Synthetic Polypeptide
KYNAVKLGKYEDSNSVTCSVQHDNKTVHSTDFEVKTDSTDHVKPKETENTKQPSKSCHKPKAIVHTEKVNMMSLTVLGLRMLFAKTVAVNFLLTAKLFFL

SEQ ID NO: 8245 - protein, 99 aa, Artificial Sequence
  Synthetic Polypeptide
YNAVKLGKYEDSNSVTCSVQHDNKTVHSTDFEVKTDSTDHVKPKETENTKQPSKSCHKPKAIVHTEKVNMMSLTVLGLRMLFAKTVAVNFLLTAKLFFL

SEQ ID NO: 8246 - protein, 98 aa, Artificial Sequence
  Synthetic Polypeptide
NAVKLGKYEDSNSVTCSVQHDNKTVHSTDFEVKTDSTDHVKPKETENTKQPSKSCHKPKAIVHTEKVNMMSLTVLGLRMLFAKTVAVNFLLTAKLFFL

SEQ ID NO: 8247 - protein, 97 aa, Artificial Sequence
  Synthetic Polypeptide
AVKLGKYEDSNSVTCSVQHDNKTVHSTDFEVKTDSTDHVKPKETENTKQPSKSCHKPKAIVHTEKVNMMSLTVLGLRMLFAKTVAVNFLLTAKLFFL

SEQ ID NO: 8248 - protein, 96 aa, Artificial Sequence
  Synthetic Polypeptide
VKLGKYEDSNSVTCSVQHDNKTVHSTDFEVKTDSTDHVKPKETENTKQPSKSCHKPKAIVHTEKVNMMSLTVLGLRMLFAKTVAVNFLLTAKLFFL

SEQ ID NO: 8249 - protein, 95 aa, Artificial Sequence
  Synthetic Polypeptide
KLGKYEDSNSVTCSVQHDNKTVHSTDFEVKTDSTDHVKPKETENTKQPSKSCHKPKAIVHTEKVNMMSLTVLGLRMLFAKTVAVNFLLTAKLFFL

SEQ ID NO: 8250 - protein, 94 aa, Artificial Sequence
  Synthetic Polypeptide
LGKYEDSNSVTCSVQHDNKTVHSTDFEVKTDSTDHVKPKETENTKQPSKSCHKPKAIVHTEKVNMMSLTVLGLRMLFAKTVAVNFLLTAKLFFL

SEQ ID NO: 8251 - protein, 93 aa, Artificial Sequence
  Synthetic Polypeptide
GKYEDSNSVTCSVQHDNKTVHSTDFEVKTDSTDHVKPKETENTKQPSKSCHKPKAIVHTEKVNMMSLTVLGLRMLFAKTVAVNFLLTAKLFFL

SEQ ID NO: 8252 - protein, 92 aa, Artificial Sequence
  Synthetic Polypeptide
KYEDSNSVTCSVQHDNKTVHSTDFEVKTDSTDHVKPKETENTKQPSKSCHKPKAIVHTEKVNMMSLTVLGLRMLFAKTVAVNFLLTAKLFFL

SEQ ID NO: 8253 - protein, 91 aa, Artificial Sequence
  Synthetic Polypeptide
YEDSNSVTCSVQHDNKTVHSTDFEVKTDSTDHVKPKETENTKQPSKSCHKPKAIVHTEKVNMMSLTVLGLRMLFAKTVAVNFLLTAKLFFL

SEQ ID NO: 8254 - protein, 90 aa, Artificial Sequence
  Synthetic Polypeptide
EDSNSVTCSVQHDNKTVHSTDFEVKTDSTDHVKPKETENTKQPSKSCHKPKAIVHTEKVNMMSLTVLGLRMLFAKTVAVNFLLTAKLFFL

SEQ ID NO: 8255 - protein, 89 aa, Artificial Sequence
  Synthetic Polypeptide
DSNSVTCSVQHDNKTVHSTDFEVKTDSTDHVKPKETENTKQPSKSCHKPKAIVHTEKVNMMSLTVLGLRMLFAKTVAVNFLLTAKLFFL

SEQ ID NO: 8256 - protein, 88 aa, Artificial Sequence
  Synthetic Polypeptide
SNSVTCSVQHDNKTVHSTDFEVKTDSTDHVKPKETENTKQPSKSCHKPKAIVHTEKVNMMSLTVLGLRMLFAKTVAVNFLLTAKLFFL

SEQ ID NO: 8257 - protein, 87 aa, Artificial Sequence
  Synthetic Polypeptide
NSVTCSVQHDNKTVHSTDFEVKTDSTDHVKPKETENTKQPSKSCHKPKAIVHTEKVNMMSLTVLGLRMLFAKTVAVNFLLTAKLFFL

SEQ ID NO: 8258 - protein, 86 aa, Artificial Sequence
  Synthetic Polypeptide
SVTCSVQHDNKTVHSTDFEVKTDSTDHVKPKETENTKQPSKSCHKPKAIVHTEKVNMMSLTVLGLRMLFAKTVAVNFLLTAKLFFL

SEQ ID NO: 8259 - protein, 85 aa, Artificial Sequence
  Synthetic Polypeptide
VTCSVQHDNKTVHSTDFEVKTDSTDHVKPKETENTKQPSKSCHKPKAIVHTEKVNMMSLTVLGLRMLFAKTVAVNFLLTAKLFFL

SEQ ID NO: 8260 - protein, 84 aa, Artificial Sequence
  Synthetic Polypeptide
TCSVQHDNKTVHSTDFEVKTDSTDHVKPKETENTKQPSKSCHKPKAIVHTEKVNMMSLTVLGLRMLFAKTVAVNFLLTAKLFFL

SEQ ID NO: 8261 - protein, 83 aa, Artificial Sequence
  Synthetic Polypeptide
CSVQHDNKTVHSTDFEVKTDSTDHVKPKETENTKQPSKSCHKPKAIVHTEKVNMMSLTVLGLRMLFAKTVAVNFLLTAKLFFL

SEQ ID NO: 8262 - protein, 82 aa, Artificial Sequence
  Synthetic Polypeptide
SVQHDNKTVHSTDFEVKTDSTDHVKPKETENTKQPSKSCHKPKAIVHTEKVNMMSLTVLGLRMLFAKTVAVNFLLTAKLFFL

SEQ ID NO: 8263 - protein, 81 aa, Artificial Sequence
  Synthetic Polypeptide
VQHDNKTVHSTDFEVKTDSTDHVKPKETENTKQPSKSCHKPKAIVHTEKVNMMSLTVLGLRMLFAKTVAVNFLLTAKLFFL

SEQ ID NO: 8264 - protein, 80 aa, Artificial Sequence
  Synthetic Polypeptide
QHDNKTVHSTDFEVKTDSTDHVKPKETENTKQPSKSCHKPKAIVHTEKVNMMSLTVLGLRMLFAKTVAVNFLLTAKLFFL

SEQ ID NO: 8265 - protein, 79 aa, Artificial Sequence
  Synthetic Polypeptide
HDNKTVHSTDFEVKTDSTDHVKPKETENTKQPSKSCHKPKAIVHTEKVNMMSLTVLGLRMLFAKTVAVNFLLTAKLFFL

SEQ ID NO: 8266 - protein, 78 aa, Artificial Sequence
  Synthetic Polypeptide
DNKTVHSTDFEVKTDSTDHVKPKETENTKQPSKSCHKPKAIVHTEKVNMMSLTVLGLRMLFAKTVAVNFLLTAKLFFL

SEQ ID NO: 8267 - protein, 77 aa, Artificial Sequence
  Synthetic Polypeptide
NKTVHSTDFEVKTDSTDHVKPKETENTKQPSKSCHKPKAIVHTEKVNMMSLTVLGLRMLFAKTVAVNFLLTAKLFFL

SEQ ID NO: 8268 - protein, 76 aa, Artificial Sequence
  Synthetic Polypeptide
KTVHSTDFEVKTDSTDHVKPKETENTKQPSKSCHKPKAIVHTEKVNMMSLTVLGLRMLFAKTVAVNFLLTAKLFFL

SEQ ID NO: 8269 - protein, 75 aa, Artificial Sequence
  Synthetic Polypeptide
TVHSTDFEVKTDSTDHVKPKETENTKQPSKSCHKPKAIVHTEKVNMMSLTVLGLRMLFAKTVAVNFLLTAKLFFL

SEQ ID NO: 8270 - protein, 74 aa, Artificial Sequence
  Synthetic Polypeptide
VHSTDFEVKTDSTDHVKPKETENTKQPSKSCHKPKAIVHTEKVNMMSLTVLGLRMLFAKTVAVNFLLTAKLFFL

SEQ ID NO: 8271 - protein, 73 aa, Artificial Sequence
  Synthetic Polypeptide
HSTDFEVKTDSTDHVKPKETENTKQPSKSCHKPKAIVHTEKVNMMSLTVLGLRMLFAKTVAVNFLLTAKLFFL

SEQ ID NO: 8272 - protein, 72 aa, Artificial Sequence
  Synthetic Polypeptide
STDFEVKTDSTDHVKPKETENTKQPSKSCHKPKAIVHTEKVNMMSLTVLGLRMLFAKTVAVNFLLTAKLFFL

SEQ ID NO: 8273 - protein, 71 aa, Artificial Sequence
  Synthetic Polypeptide
TDFEVKTDSTDHVKPKETENTKQPSKSCHKPKAIVHTEKVNMMSLTVLGLRMLFAKTVAVNFLLTAKLFFL

SEQ ID NO: 8274 - protein, 70 aa, Artificial Sequence
  Synthetic Polypeptide
DFEVKTDSTDHVKPKETENTKQPSKSCHKPKAIVHTEKVNMMSLTVLGLRMLFAKTVAVNFLLTAKLFFL

SEQ ID NO: 8275 - protein, 69 aa, Artificial Sequence
  Synthetic Polypeptide
FEVKTDSTDHVKPKETENTKQPSKSCHKPKAIVHTEKVNMMSLTVLGLRMLFAKTVAVNFLLTAKLFFL

SEQ ID NO: 8276 - protein, 68 aa, Artificial Sequence; identical to SEQ ID NO: 3533
  Synthetic Polypeptide

SEQ ID NO: 8277 - protein, 67 aa, Artificial Sequence
  Synthetic Polypeptide
VKTDSTDHVKPKETENTKQPSKSCHKPKAIVHTEKVNMMSLTVLGLRMLFAKTVAVNFLLTAKLFFL

SEQ ID NO: 8278 - protein, 66 aa, Artificial Sequence
  Synthetic Polypeptide
KTDSTDHVKPKETENTKQPSKSCHKPKAIVHTEKVNMMSLTVLGLRMLFAKTVAVNFLLTAKLFFL

SEQ ID NO: 8279 - protein, 65 aa, Artificial Sequence
  Synthetic Polypeptide
TDSTDHVKPKETENTKQPSKSCHKPKAIVHTEKVNMMSLTVLGLRMLFAKTVAVNFLLTAKLFFL

SEQ ID NO: 8280 - protein, 64 aa, Artificial Sequence
  Synthetic Polypeptide
DSTDHVKPKETENTKQPSKSCHKPKAIVHTEKVNMMSLTVLGLRMLFAKTVAVNFLLTAKLFFL

SEQ ID NO: 8281 - protein, 63 aa, Artificial Sequence
  Synthetic Polypeptide
STDHVKPKETENTKQPSKSCHKPKAIVHTEKVNMMSLTVLGLRMLFAKTVAVNFLLTAKLFFL

SEQ ID NO: 8282 - protein, 62 aa, Artificial Sequence
  Synthetic Polypeptide
TDHVKPKETENTKQPSKSCHKPKAIVHTEKVNMMSLTVLGLRMLFAKTVAVNFLLTAKLFFL

SEQ ID NO: 8283 - protein, 61 aa, Artificial Sequence; identical to SEQ ID NO: 3534
  Synthetic Polypeptide

SEQ ID NO: 8284 - protein, 60 aa, Artificial Sequence
  Synthetic Polypeptide
HVKPKETENTKQPSKSCHKPKAIVHTEKVNMMSLTVLGLRMLFAKTVAVNFLLTAKLFFL

SEQ ID NO: 8285 - protein, 59 aa, Artificial Sequence
  Synthetic Polypeptide
VKPKETENTKQPSKSCHKPKAIVHTEKVNMMSLTVLGLRMLFAKTVAVNFLLTAKLFFL

SEQ ID NO: 8286 - protein, 58 aa, Artificial Sequence
  Synthetic Polypeptide
KPKETENTKQPSKSCHKPKAIVHTEKVNMMSLTVLGLRMLFAKTVAVNFLLTAKLFFL

SEQ ID NO: 8287 - protein, 57 aa, Artificial Sequence
  Synthetic Polypeptide
PKETENTKQPSKSCHKPKAIVHTEKVNMMSLTVLGLRMLFAKTVAVNFLLTAKLFFL

SEQ ID NO: 8288 - protein, 56 aa, Artificial Sequence
  Synthetic Polypeptide
KETENTKQPSKSCHKPKAIVHTEKVNMMSLTVLGLRMLFAKTVAVNFLLTAKLFFL

SEQ ID NO: 8289 - protein, 55 aa, Artificial Sequence
  Synthetic Polypeptide
ETENTKQPSKSCHKPKAIVHTEKVNMMSLTVLGLRMLFAKTVAVNFLLTAKLFFL

SEQ ID NO: 8290 - protein, 54 aa, Artificial Sequence
  Synthetic Polypeptide
TENTKQPSKSCHKPKAIVHTEKVNMMSLTVLGLRMLFAKTVAVNFLLTAKLFFL

SEQ ID NO: 8291 - protein, 53 aa, Artificial Sequence
  Synthetic Polypeptide
ENTKQPSKSCHKPKAIVHTEKVNMMSLTVLGLRMLFAKTVAVNFLLTAKLFFL

SEQ ID NO: 8292 - protein, 52 aa, Artificial Sequence
  Synthetic Polypeptide
NTKQPSKSCHKPKAIVHTEKVNMMSLTVLGLRMLFAKTVAVNFLLTAKLFFL

SEQ ID NO: 8293 - protein, 629 aa, Artificial Sequence
  Synthetic Polypeptide
MALPVTALLLPLALLLHAARPACEVQLLESGGGLIQPGGSLRLSCAASGFTFSSHAMTWVRQAPGKGLEWVSAISGSGDYTHYADSVKGRFTISRDNSKNTVYLQMNSLRAEDSAVYYCAKDEDGGSLLGHRGQGTLVTVSSGTGGGGSGGGGSGGGGSEFGMRTEDLPKAVVFLEPQWYRVLEKDSVTLKCQGAYSPEDNSTQWFHNESLISSQASSYFIDAATVDDSGEYRCQTNLSTLSDPVQLEVHIGWLLLQAPRWVFKEEDPIHLRCHSWKNTALHKVTYLQNGKGRKYFHHNSDFYIPKATLKDSGSYFCRGLVGSKNVSSETVNITITQGLAVSTISSFFPPGYQVSFCLVMVLLFAVDTGLYFSVKTNIRSSTRDWKDHKFKWRKDPQDKRAKRSGSGATNFSLLKQAGDVEENPGPTRGHMTEYKPTVRLATRDDVPRAVRTLAAAFADYPATRHTVDPDRHIERVTELQELFLTRVGLDIGKVWVADDGAAVAVWTTPESVEAGAVFAEIGPRMAELSGSRLAAQQQMEGLLAPHRPKEPAWFLATVGVSPDHQGKGLGSAVVLPGVEAAERAGVPAFLETSAPRNLPFYERLGFTVTADVEVPEGPRTWCMTRKPGA

SEQ ID NO: 8294 - protein, 757 aa, Artificial Sequence
  Synthetic Polypeptide
MALPVTALLLPLALLLHAARPQIVLSQSPAILSASPGEKVTMTCRASSSVSYMHWYQQKPGSSPKPWIYATSNLASGVPARFSGSGSGTSYSFTISRVEAEDAATYYCQQWTFNPPTFGGGTRLEIKRTVAAGGGGSGGGGSGGGGSQAYLQQSGAELVRPGASVKMSCKASGYTFTSYNMHWVKQTPRQGLEWIGGIYPGNGDTSYNQKFKGKATLTVGKSSSTAYMQLSSLTSEDSAVYFCARYDYNYAMDYWGQGTSVTVSSASTRQSKAQVLQSVAGQTLTVRCQYPPTGSLYEKKGWCKEASALVCIRLVTSSKPRTMAWTSRFTIWDDPDAGFFTVTMTDLREEDSGHYWCRIYRPSDNSVSKSVRFYLVVSPASASTQTSWTPRDLVSSQTQTQSCVPPTAGARQAPESPSTIPVPSQPQNSTLRPGPAAPIALVPVFCGLLVAKSLVLSALLVWWGDIWWKTMMELRSLDTQKATCHLQQVTDLPWTSVSSPVEREILYHTVARTKISDDDDEHTLRAKRSGSGVKQTLNFDLLKLAGDVESNPGPSRGHMTEYKPTVRLATRDDVPRAVRTLAAAFADYPATRHTVDPDRHIERVTELQELFLTRVGLDIGKVWVADDGAAVAVWTTPESVEAGAVFAEIGPRMAELSGSRLAAQQQMEGLLAPHRPKEPAWFLATVGVSPDHQGKGLGSAVVLPGVEAAERAGVPAFLETSAPRNLPFYERLGFTVTADVEVPEGPRTWCMTRKPGA

SEQ ID NO: 8295 - protein, 755 aa, Artificial Sequence
  Synthetic Polypeptide
MALPVTALLLPLALLLHAARPDIQMTQSPSSLSASVGDRVTITCSASQDISNYLNWYQQKPGKAPKLLIYYTSNLHSGVPSRFSGSGSGTDFTLTISSLQPEDFATYYCQQYRKLPWTFGQGTKLEIKRGGGGSGGGGSGGGGSQVQLVQSGAEVKKPGSSVKVSCKASGGTFSNYWMHWVRQAPGQGLEWMGATYRGHSDTYYNQKFKGRVTITADKSTSTAYMELSSLRSEDTAVYYCARGAIYDGYDVLDNWGQGTLVTVSSTRQSKAQVLQSVAGQTLTVRCQYPPTGSLYEKKGWCKEASALVCIRLVTSSKPRTMAWTSRFTIWDDPDAGFFTVTMTDLREEDSGHYWCRIYRPSDNSVSKSVRFYLVVSPASASTQTSWTPRDLVSSQTQTQSCVPPTAGARQAPESPSTIPVPSQPQNSTLRPGPAAPIALVPVFCGLLVAKSLVLSALLVWWGDIWWKTMMELRSLDTQKATCHLQQVTDLPWTSVSSPVEREILYHTVARTKISDDDDEHTLRAKRSGSGVKQTLNFDLLKLAGDVESNPGPSRGHMTEYKPTVRLATRDDVPRAVRTLAAAFADYPATRHTVDPDRHIERVTELQELFLTRVGLDIGKVWVADDGAAVAVWTTPESVEAGAVFAEIGPRMAELSGSRLAAQQQMEGLLAPHRPKEPAWFLATVGVSPDHQGKGLGSAVVLPGVEAAERAGVPAFLETSAPRNLPFYERLGFTVTADVEVPEGPRTWCMTRKPGA

SEQ ID NO: 8296 - protein, 759 aa, Artificial Sequence
  Synthetic Polypeptide
MALPVTALLLPLALLLHAARPDIQMTQSPSSLSASVGDRVTITCRSSQSIVHSVGNTFLEWYQQKPGKAPKLLIYKVSNRFSGVPSRFSGSGSGTDFTLTISSLQPEDFATYYCFQGSQFPYTFGQGTKVEIKRGGGGSGGGGSGGGGSEVQLVESGGGLVQPGGSLRLSCAASGYEFSRSWMNWVRQAPGKGLEWVGRIYPGDGDTNYSGKFKGRFTISADTSKNTAYLQMNSLRAEDTAVYYCARDGSSWDWYFDVWGQGTLVTVSSTRQSKAQVLQSVAGQTLTVRCQYPPTGSLYEKKGWCKEASALVCIRLVTSSKPRTMAWTSRFTIWDDPDAGFFTVTMTDLREEDSGHYWCRIYRPSDNSVSKSVRFYLVVSPASASTQTSWTPRDLVSSQTQTQSCVPPTAGARQAPESPSTIPVPSQPQNSTLRPGPAAPIALVPVFCGLLVAKSLVLSALLVWWGDIWWKTMMELRSLDTQKATCHLQQVTDLPWTSVSSPVEREILYHTVARTKISDDDDEHTLRAKRSGSGVKQTLNFDLLKLAGDVESNPGPSRGHMTEYKPTVRLATRDDVPRAVRTLAAAFADYPATRHTVDPDRHIERVTELQELFLTRVGLDIGKVWVADDGAAVAVWTTPESVEAGAVFAEIGPRMAELSGSRLAAQQQMEGLLAPHRPKEPAWFLATVGVSPDHQGKGLGSAVVLPGVEAAERAGVPAFLETSAPRNLPFYERLGFTVTADVEVPEGPRTWCMTRKPGA

SEQ ID NO: 8297 - protein, 630 aa, Artificial Sequence
  Synthetic Polypeptide
MALPVTALLLPLALLLHAARPFEVQLVESGGGLVQAGGSLRLSCAASGRTFTMGWFRQAPGKEREFVAAISLSPTLAYYADSVKGRFTISRDNAKNTVVLQMNSLKPEDTALYYCAADRKSVMSIRPDYWGQGTQVTVSSTRQSKAQVLQSVAGQTLTVRCQYPPTGSLYEKKGWCKEASALVCIRLVTSSKPRTMAWTSRFTIWDDPDAGFFTVTMTDLREEDSGHYWCRIYRPSDNSVSKSVRFYLVVSPASASTQTSWTPRDLVSSQTQTQSCVPPTAGARQAPESPSTIPVPSQPQNSTLRPGPAAPIALVPVFCGLLVAKSLVLSALLVWWGDIWWKTMMELRSLDTQKATCHLQQVTDLPWTSVSSPVEREILYHTVARTKISDDDDEHTLRAKRSGSGVKQTLNFDLLKLAGDVESNPGPSRGHMTEYKPTVRLATRDDVPRAVRTLAAAFADYPATRHTVDPDRHIERVTELQELFLTRVGLDIGKVWVADDGAAVAVWTTPESVEAGAVFAEIGPRMAELSGSRLAAQQQMEGLLAPHRPKEPAWFLATVGVSPDHQGKGLGSAVVLPGVEAAERAGVPAFLETSAPRNLPFYERLGFTVTADVEVPEGPRTWCMTRKPGA

SEQ ID NO: 8298 - protein, 642 aa, Artificial Sequence
  Synthetic Polypeptide
MALPVTALLLPLALLLHAARPACEVQLVESGGGVVQPGRSLRLSCAASGFSFSGYGMHWVRQAPGKGLEWVAYISYDGSNKYYADSVKGRFTISRDNSKNTLYLQMNSLRAEDTAVYYCAKDPAWGLRLGESSSYDFDYWGQGTMVTVSSGTTRQSKAQVLQSVAGQTLTVRCQYPPTGSLYEKKGWCKEASALVCIRLVTSSKPRTMAWTSRFTIWDDPDAGFFTVTMTDLREEDSGHYWCRIYRPSDNSVSKSVRFYLVVSPASASTQTSWTPRDLVSSQTQTQSCVPPTAGARQAPESPSTIPVPSQPQNSTLRPGPAAPIALVPVFCGLLVAKSLVLSALLVWWGDIWWKTMMELRSLDTQKATCHLQQVTDLPWTSVSSPVEREILYHTVARTKISDDDDEHTLRAKRSGSGVKQTLNFDLLKLAGDVESNPGPSRGHMTEYKPTVRLATRDDVPRAVRTLAAAFADYPATRHTVDPDRHIERVTELQELFLTRVGLDIGKVWVADDGAAVAVWTTPESVEAGAVFAEIGPRMAELSGSRLAAQQQMEGLLAPHRPKEPAWFLATVGVSPDHQGKGLGSAVVLPGVEAAERAGVPAFLETSAPRNLPFYERLGFTVTADVEVPEGPRTWCMTRKPGA

SEQ ID NO: 8299 - protein, 683 aa, Artificial Sequence
  Synthetic Polypeptide
MALPVTALLLPLALLLHAARPDIQMTQSPSSLSASVGDRVTITCKASDHINNWLAWYQQKPGQAPKLLIYGATTLETGVPSRFSGSGSGTDYTLTISSLQPEDFATYYCQQSWNTPWTFGQGTKLEIKRGGGGSGGGGSGGGGSQVQLQQPGAELVKPGASVKMSCKASGYAFSSYWINWMKQKPGQGLEWIGQIYPGDGDTNYNGKFKGRATLTADTSSSTAYMQLSSLTSEDSAVYFCARSITTVVGCAMDYWGQGTSVTVSSTRLWVSQPPEIRTLEGSSAFLPCSFNASQGRLAIGSVTWFRDEVVPGKEVRNGTPEFRGRLAPLASSRFLHDHQAELHIRDVRGHDASIYVCRVEVLGLGVGTGNGTRLVVEKEHPQLGAGTVLLLRAGFYAVSFLSVAVGSTVYYQGKCLTWKGPRRQLPAVVPAPLPPPCGSSAHLLPPVPGGRAKRSGSGVKQTLNFDLLKLAGDVESNPGPSRGHMTEYKPTVRLATRDDVPRAVRTLAAAFADYPATRHTVDPDRHIERVTELQELFLTRVGLDIGKVWVADDGAAVAVWTTPESVEAGAVFAEIGPRMAELSGSRLAAQQQMEGLLAPHRPKEPAWFLATVGVSPDHQGKGLGSAVVLPGVEAAERAGVPAFLETSAPRNLPFYERLGFTVTADVEVPEGPRTWCMTRKPGA

SEQ ID NO: 8300 - protein, 681 aa, Artificial Sequence
  Synthetic Polypeptide
MALPVTALLLPLALLLHAARPDIQMTQTTSSLSASLGDRVTISCRASQDISKYLNWYQQKPDGTVKLLIYHTSRLHSGVPSRFSGSGSGTDYSLTISNLEQEDIATYFCQQGNTLPYTFGGGTKLEITGGGGSGGGGSGGGGSEVKLQESGPGLVAPSQSLSVTCTVSGVSLPDYGVSWIRQPPRKGLEWLGVIWGSETTYYNSALKSRLTIIKDNSKSQVFLKMNSLQTDDTAIYYCAKHYYYGGSYAMDYWGQGTSVTVSSTRLWVSQPPEIRTLEGSSAFLPCSFNASQGRLAIGSVTWFRDEVVPGKEVRNGTPEFRGRLAPLASSRFLHDHQAELHIRDVRGHDASIYVCRVEVLGLGVGTGNGTRLVVEKEHPQLGAGTVLLLRAGFYAVSFLSVAVGSTVYYQGKCLTWKGPRRQLPAVVPAPLPPPCGSSAHLLPPVPGGRAKRSGSGVKQTLNFDLLKLAGDVESNPGPSRGHMTEYKPTVRLATRDDVPRAVRTLAAAFADYPATRHTVDPDRHIERVTELQELFLTRVGLDIGKVWVADDGAAVAVWTTPESVEAGAVFAEIGPRMAELSGSRLAAQQQMEGLLAPHRPKEPAWFLATVGVSPDHQGKGLGSAVVLPGVEAAERAGVPAFLETSAPRNLPFYERLGFTVTADVEVPEGPRTWCMTRKPGA

SEQ ID NO: 8301 - protein, 684 aa, Artificial Sequence
  Synthetic Polypeptide
MALPVTALLLPLALLLHAARPDEIVLTQSPATLSLSPGERATLSCRASQSVSSYLAWYQQKPGQAPRLLIYDASNRATGIPARFSGSGSGTDFTLTISSLEPEDFAVYYCQQRSNWPITFGQGTRLEIKGGGGSGGGGSGGGGSEVQLVESGGGLVQPGRSLRLSCAASGFTFNDYAMHWVRQAPGKGLEWVSTISWNSGSIGYADSVKGRFTISRDNAKKSLYLQMNSLRAEDTALYYCAKDIQYGNYYYGMDVWGQGTTVTVSSTRLWVSQPPEIRTLEGSSAFLPCSFNASQGRLAIGSVTWFRDEVVPGKEVRNGTPEFRGRLAPLASSRFLHDHQAELHIRDVRGHDASIYVCRVEVLGLGVGTGNGTRLVVEKEHPQLGAGTVLLLRAGFYAVSFLSVAVGSTVYYQGKCLTWKGPRRQLPAVVPAPLPPPCGSSAHLLPPVPGGRAKRSGSGVKQTLNFDLLKLAGDVESNPGPSRGHMTEYKPTVRLATRDDVPRAVRTLAAAFADYPATRHTVDPDRHIERVTELQELFLTRVGLDIGKVWVADDGAAVAVWTTPESVEAGAVFAEIGPRMAELSGSRLAAQQQMEGLLAPHRPKEPAWFLATVGVSPDHQGKGLGSAVVLPGVEAAERAGVPAFLETSAPRNLPFYERLGFTVTADVEVPEGPRTWCMTRKPGA

SEQ ID NO: 8302 - protein, 679 aa, Artificial Sequence
  Synthetic Polypeptide
MALPVTALLLPLALLLHAARPDVVMTQSPSSLSASVGDRVTITCMASEDIYIRLAWYQQKPGNAPKLLIYAATSLETGVPSRFSGSGSGTDFTLTISSLQPEDFATYYCQQYWSSPWTFGGGTKVEIKGGGGSGGGGSGGGGSQVQLQESGPGLVKPSQTLSLTCTVSGYSITSDYTWNWIRQPPGNGLEWIGYITYSGSTSYNPSLKSRVLISVDTSKNQVSLKLSSVTAADTAVYYCARLGRRYTMDYWGQGTTVTVSSTRLWVSQPPEIRTLEGSSAFLPCSFNASQGRLAIGSVTWFRDEVVPGKEVRNGTPEFRGRLAPLASSRFLHDHQAELHIRDVRGHDASIYVCRVEVLGLGVGTGNGTRLVVEKEHPQLGAGTVLLLRAGFYAVSFLSVAVGSTVYYQGKCLTWKGPRRQLPAVVPAPLPPPCGSSAHLLPPVPGGRAKRSGSGVKQTLNFDLLKLAGDVESNPGPSRGHMTEYKPTVRLATRDDVPRAVRTLAAAFADYPATRHTVDPDRHIERVTELQELFLTRVGLDIGKVWVADDGAAVAVWTTPESVEAGAVFAEIGPRMAELSGSRLAAQQQMEGLLAPHRPKEPAWFLATVGVSPDHQGKGLGSAVVLPGVEAAERAGVPAFLETSAPRNLPFYERLGFTVTADVEVPEGPRTWCMTRKPGA

SEQ ID NO: 8303 - protein, 683 aa, Artificial Sequence
  Synthetic Polypeptide
MALPVTALLLPLALLLHAARPDIQMTQSPSSLSASVGDRVTITCSASQDISNYLNWYQQKPGKAPKLLIYYTSNLHSGVPSRFSGSGSGTDFTLTISSLQPEDFATYYCQQYRKLPWTFGQGTKLEIKRGGGGSGGGGSGGGGSQVQLVQSGAEVKKPGSSVKVSCKASGGTFSNYWMHWVRQAPGQGLEWMGATYRGHSDTYYNQKFKGRVTITADKSTSTAYMELSSLRSEDTAVYYCARGAIYDGYDVLDNWGQGTLVTVSSTRLWVSQPPEIRTLEGSSAFLPCSFNASQGRLAIGSVTWFRDEVVPGKEVRNGTPEFRGRLAPLASSRFLHDHQAELHIRDVRGHDASIYVCRVEVLGLGVGTGNGTRLVVEKEHPQLGAGTVLLLRAGFYAVSFLSVAVGSTVYYQGKCLTWKGPRRQLPAVVPAPLPPPCGSSAHLLPPVPGGRAKRSGSGVKQTLNFDLLKLAGDVESNPGPSRGHMTEYKPTVRLATRDDVPRAVRTLAAAFADYPATRHTVDPDRHIERVTELQELFLTRVGLDIGKVWVADDGAAVAVWTTPESVEAGAVFAEIGPRMAELSGSRLAAQQQMEGLLAPHRPKEPAWFLATVGVSPDHQGKGLGSAVVLPGVEAAERAGVPAFLETSAPRNLPFYERLGFTVTADVEVPEGPRTWCMTRKPGA

SEQ ID NO: 8304 - protein, 687 aa, Artificial Sequence
  Synthetic Polypeptide
MALPVTALLLPLALLLHAARPDIQMTQSPSSLSASVGDRVTITCRSSQSIVHSVGNTFLEWYQQKPGKAPKLLIYKVSNRFSGVPSRFSGSGSGTDFTLTISSLQPEDFATYYCFQGSQFPYTFGQGTKVEIKRGGGGSGGGGSGGGGSEVQLVESGGGLVQPGGSLRLSCAASGYEFSRSWMNWVRQAPGKGLEWVGRIYPGDGDTNYSGKFKGRFTISADTSKNTAYLQMNSLRAEDTAVYYCARDGSSWDWYFDVWGQGTLVTVSSTRLWVSQPPEIRTLEGSSAFLPCSFNASQGRLAIGSVTWFRDEVVPGKEVRNGTPEFRGRLAPLASSRFLHDHQAELHIRDVRGHDASIYVCRVEVLGLGVGTGNGTRLVVEKEHPQLGAGTVLLLRAGFYAVSFLSVAVGSTVYYQGKCLTWKGPRRQLPAVVPAPLPPPCGSSAHLLPPVPGGRAKRSGSGVKQTLNFDLLKLAGDVESNPGPSRGHMTEYKPTVRLATRDDVPRAVRTLAAAFADYPATRHTVDPDRHIERVTELQELFLTRVGLDIGKVWVADDGAAVAVWTTPESVEAGAVFAEIGPRMAELSGSRLAAQQQMEGLLAPHRPKEPAWFLATVGVSPDHQGKGLGSAVVLPGVEAAERAGVPAFLETSAPRNLPFYERLGFTVTADVEVPEGPRTWCMTRKPGA

SEQ ID NO: 8305 - protein, 684 aa, Artificial Sequence
  Synthetic Polypeptide
MALPVTALLLPLALLLHAARPDIQMTQSPSSLSASVGDRVTITCRASQDISNYLNWYQQKPGKAPKLLIYYTSILHSGVPSRFSGSGSGTDYTLTISSLQPEDFATYYCQQGNTLPWTFGQGTKVEIKAGGGGSGGGGSGGGGSEVQLVESGGGLVQPGGSLRLSCAASGFAFSIYDMSWVRQAPGKGLEWVAYISSGGGTYYPDTVKGRFTISVDKSKNTAYLQMNSLRAEDTAVYYCARHSGYGTHWGVLFAYWGQGTLVTVSSTRLWVSQPPEIRTLEGSSAFLPCSFNASQGRLAIGSVTWFRDEVVPGKEVRNGTPEFRGRLAPLASSRFLHDHQAELHIRDVRGHDASIYVCRVEVLGLGVGTGNGTRLVVEKEHPQLGAGTVLLLRAGFYAVSFLSVAVGSTVYYQGKCLTWKGPRRQLPAVVPAPLPPPCGSSAHLLPPVPGGRAKRSGSGVKQTLNFDLLKLAGDVESNPGPSRGHMTEYKPTVRLATRDDVPRAVRTLAAAFADYPATRHTVDPDRHIERVTELQELFLTRVGLDIGKVWVADDGAAVAVWTTPESVEAGAVFAEIGPRMAELSGSRLAAQQQMEGLLAPHRPKEPAWFLATVGVSPDHQGKGLGSAVVLPGVEAAERAGVPAFLETSAPRNLPFYERLGFTVTADVEVPEGPRTWCMTRKPGA

SEQ ID NO: 8306 - protein, 558 aa, Artificial Sequence
  Synthetic Polypeptide
MALPVTALLLPLALLLHAARPFEVQLVESGGGLVQAGGSLRLSCAASGRTFSMGWFRQAPGKEREFVAAITYSGGSPYYADSVKGRFTISRDNAKNTVYLQMNSLKPEDTAVYYCAANPTYGSDWNAENWGQGTQVTVSSTRLWVSQPPEIRTLEGSSAFLPCSFNASQGRLAIGSVTWFRDEVVPGKEVRNGTPEFRGRLAPLASSRFLHDHQAELHIRDVRGHDASIYVCRVEVLGLGVGTGNGTRLVVEKEHPQLGAGTVLLLRAGFYAVSFLSVAVGSTVYYQGKCLTWKGPRRQLPAVVPAPLPPPCGSSAHLLPPVPGGRAKRSGSGVKQTLNFDLLKLAGDVESNPGPSRGHMTEYKPTVRLATRDDVPRAVRTLAAAFADYPATRHTVDPDRHIERVTELQELFLTRVGLDIGKVWVADDGAAVAVWTTPESVEAGAVFAEIGPRMAELSGSRLAAQQQMEGLLAPHRPKEPAWFLATVGVSPDHQGKGLGSAVVLPGVEAAERAGVPAFLETSAPRNLPFYERLGFTVTADVEVPEGPRTWCMTRKPGA

SEQ ID NO: 8307 - protein, 560 aa, Artificial Sequence
  Synthetic Polypeptide
MALPVTALLLPLALLLHAARPFEQVKLEESGGGLVQPGESLRLSCSASGSIFKVFRVFAMSWYRQGPGKQRELVASISSGETTTYAESVKGRFTISRDNAKNTAYLQMDSLKPEDTAVYYCNADHTFTGDFWGQGTQVTVSSTRLWVSQPPEIRTLEGSSAFLPCSFNASQGRLAIGSVTWFRDEVVPGKEVRNGTPEFRGRLAPLASSRFLHDHQAELHIRDVRGHDASIYVCRVEVLGLGVGTGNGTRLVVEKEHPQLGAGTVLLLRAGFYAVSFLSVAVGSTVYYQGKCLTWKGPRRQLPAVVPAPLPPPCGSSAHLLPPVPGGRAKRSGSGVKQTLNFDLLKLAGDVESNPGPSRGHMTEYKPTVRLATRDDVPRAVRTLAAAFADYPATRHTVDPDRHIERVTELQELFLTRVGLDIGKVWVADDGAAVAVWTTPESVEAGAVFAEIGPRMAELSGSRLAAQQQMEGLLAPHRPKEPAWFLATVGVSPDHQGKGLGSAVVLPGVEAAERAGVPAFLETSAPRNLPFYERLGFTVTADVEVPEGPRTWCMTRKPGA

SEQ ID NO: 8308 - protein, 558 aa, Artificial Sequence
  Synthetic Polypeptide
MALPVTALLLPLALLLHAARPFEVQLVESGGGLVQAGGSLRLSCAASGRTFTMGWFRQAPGKEREFVAAISLSPTLAYYADSVKGRFTISRDNAKNTVVLQMNSLKPEDTALYYCAADRKSVMSIRPDYWGQGTQVTVSSTRLWVSQPPEIRTLEGSSAFLPCSFNASQGRLAIGSVTWFRDEVVPGKEVRNGTPEFRGRLAPLASSRFLHDHQAELHIRDVRGHDASIYVCRVEVLGLGVGTGNGTRLVVEKEHPQLGAGTVLLLRAGFYAVSFLSVAVGSTVYYQGKCLTWKGPRRQLPAVVPAPLPPPCGSSAHLLPPVPGGRAKRSGSGVKQTLNFDLLKLAGDVESNPGPSRGHMTEYKPTVRLATRDDVPRAVRTLAAAFADYPATRHTVDPDRHIERVTELQELFLTRVGLDIGKVWVADDGAAVAVWTTPESVEAGAVFAEIGPRMAELSGSRLAAQQQMEGLLAPHRPKEPAWFLATVGVSPDHQGKGLGSAVVLPGVEAAERAGVPAFLETSAPRNLPFYERLGFTVTADVEVPEGPRTWCMTRKPGA

SEQ ID NO: 8309 - protein, 570 aa, Artificial Sequence
  Synthetic Polypeptide
MALPVTALLLPLALLLHAARPACEVQLVESGGGVVQPGRSLRLSCAASGFSFSGYGMHWVRQAPGKGLEWVAYISYDGSNKYYADSVKGRFTISRDNSKNTLYLQMNSLRAEDTAVYYCAKDPAWGLRLGESSSYDFDYWGQGTMVTVSSGTTRLWVSQPPEIRTLEGSSAFLPCSFNASQGRLAIGSVTWFRDEVVPGKEVRNGTPEFRGRLAPLASSRFLHDHQAELHIRDVRGHDASIYVCRVEVLGLGVGTGNGTRLVVEKEHPQLGAGTVLLLRAGFYAVSFLSVAVGSTVYYQGKCLTWKGPRRQLPAVVPAPLPPPCGSSAHLLPPVPGGRAKRSGSGVKQTLNFDLLKLAGDVESNPGPSRGHMTEYKPTVRLATRDDVPRAVRTLAAAFADYPATRHTVDPDRHIERVTELQELFLTRVGLDIGKVWVADDGAAVAVWTTPESVEAGAVFAEIGPRMAELSGSRLAAQQQMEGLLAPHRPKEPAWFLATVGVSPDHQGKGLGSAVVLPGVEAAERAGVPAFLETSAPRNLPFYERLGFTVTADVEVPEGPRTWCMTRKPGA

SEQ ID NO: 8310 - protein, 674 aa, Artificial Sequence
  Synthetic Polypeptide
MALPVTALLLPLALLLHAARPACEVQLLESGGGLIQPGGSLRLSCAASGFTFSSHAMTWVRQAPGKGLEWVSAISGSGDYTHYADSVKGRFTISRDNSKNTVYLQMNSLRAEDSAVYYCAKDEDGGSLLGHRGQGTLVTVSSGTGGGGSGGGGSGGGGSEFQQQTLPKPFIWAEPHFMVPKEKQVTICCQGNYGAVEYQLHFEGSLFAVDRPKPPERINKVQFYIPDMNSRMAGQYSCIYRVGELWSEPSNLLDLVVTEMYDTPTLSVHPGPEVISGEKVTFYCRLDTATSMFLLLKEGRSSHVQRGYGKVQAEFPLGPVTTAHRGTYRCFGSYNNHAWSFPSEPVKLLVTGDIENTSLAPEDPTFPADTWGTYLLTTETGLQKDHALWDHTAQNLLRMGLAFLVLVALVWFLVEDWLSRKRTRERASRASTWEGRRRLNTQTLRAKRSGSGATNFSLLKQAGDVEENPGPTRGHMTEYKPTVRLATRDDVPRAVRTLAAAFADYPATRHTVDPDRHIERVTELQELFLTRVGLDIGKVWVADDGAAVAVWTTPESVEAGAVFAEIGPRMAELSGSRLAAQQQMEGLLAPHRPKEPAWFLATVGVSPDHQGKGLGSAVVLPGVEAAERAGVPAFLETSAPRNLPFYERLGFTVTADVEVPEGPRTWCMTRKPGA

SEQ ID NO: 8311 - protein, 861 aa, Artificial Sequence
  Synthetic Polypeptide
MALPVTALLLPLALLLHAARPDIQMTQSPSSLSASVGDRVTITCKASDHINNWLAWYQQKPGQAPKLLIYGATTLETGVPSRFSGSGSGTDYTLTISSLQPEDFATYYCQQSWNTPWTFGQGTKLEIKRLEDKQLDADVSPKPTIFLPSIAETKLQKAGTYLCLLEKFFPDVIKIHWQEKKSNTILGSQEGNTMKTNDTYMKFSWLTVPEKSLDKEHRCIVRHENNKNGVDQEIIFPPIKTDVITMDPKDNCSKDANDTLLLQLTNTSAYYMYLLLLLKSVVYFAIITCCLLRRTAFCCNGEKSRAKRSGSGATNFSLLKQAGDVEENPGPTSMDWIWRILFLVGAATGAHSFEQVQLQQPGAELVKPGASVKMSCKASGYAFSSYWINWMKQKPGQGLEWIGQIYPGDGDTNYNGKFKGRATLTADTSSSTAYMQLSSLTSEDSAVYFCARSITTVVGCAMDYWGQGTSVTVSSTRPHTKPSVFVMKNGTNVACLVKEFYPKDIRINLVSSKKITEFDPAIVISPSGKYNAVKLGKYEDSNSVTCSVQHDNKTVHSTDFEVKTDSTDHVKPKETENTKQPSKSCHKPKAIVHTEKVNMMSLTVLGLRMLFAKTVAVNFLLTAKLFFLRAKRSGSGVKQTLNFDLLKLAGDVESNPGPSRGHMTEYKPTVRLATRDDVPRAVRTLAAAFADYPATRHTVDPDRHIERVTELQELFLTRVGLDIGKVWVADDGAAVAVWTTPESVEAGAVFAEIGPRMAELSGSRLAAQQQMEGLLAPHRPKEPAWFLATVGVSPDHQGKGLGSAVVLPGVEAAERAGVPAFLETSAPRNLPFYERLGFTVTADVEVPEGPRTWCMTRKPGA

SEQ ID NO: 8312 - protein, 860 aa, Artificial Sequence
  Synthetic Polypeptide
MALPVTALLLPLALLLHAARPDIQMTQSPSSLSASVGDRVTITCKASDHINNWLAWYQQKPGQAPKLLIYGATTLETGVPSRFSGSGSGTDYTLTISSLQPEDFATYYCQQSWNTPWTFGQGTKLEIKRLEKQLDADVSPKPTIFLPSIAETKLQKAGTYLCLLEKFFPDVIKIHWQEKKSNTILGSQEGNTMKTNDTYMKFSWLTVPEKSLDKEHRCIVRHENNKNGVDQEIIFPPIKTDVITMDPKDNCSKDANDTLLLQLTNTSAYYMYLLLLLKSVVYFAIITCCLLRRTAFCCNGEKSRAKRSGSGATNFSLLKQAGDVEENPGPTSMDWIWRILFLVGAATGAHSFEQVQLQQPGAELVKPGASVKMSCKASGYAFSSYWINWMKQKPGQGLEWIGQIYPGDGDTNYNGKFKGRATLTADTSSSTAYMQLSSLTSEDSAVYFCARSITTVVGCAMDYWGQGTSVTVSSTRPHTKPSVFVMKNGTNVACLVKEFYPKDIRINLVSSKKITEFDPAIVISPSGKYNAVKLGKYEDSNSVTCSVQHDNKTVHSTDFEVKTDSTDHVKPKETENTKQPSKSCHKPKAIVHTEKVNMMSLTVLGLRMLFAKTVAVNFLLTAKLFFLRAKRSGSGVKQTLNFDLLKLAGDVESNPGPSRGHMTEYKPTVRLATRDDVPRAVRTLAAAFADYPATRHTVDPDRHIERVTELQELFLTRVGLDIGKVWVADDGAAVAVWTTPESVEAGAVFAEIGPRMAELSGSRLAAQQQMEGLLAPHRPKEPAWFLATVGVSPDHQGKGLGSAVVLPGVEAAERAGVPAFLETSAPRNLPFYERLGFTVTADVEVPEGPRTWCMTRKPGA

SEQ ID NO: 8313 - protein, 859 aa, Artificial Sequence
  Synthetic Polypeptide
MALPVTALLLPLALLLHAARPDIQMTQSPSSLSASVGDRVTITCKASDHINNWLAWYQQKPGQAPKLLIYGATTLETGVPSRFSGSGSGTDYTLTISSLQPEDFATYYCQQSWNTPWTFGQGTKLEIKRLEQLDADVSPKPTIFLPSIAETKLQKAGTYLCLLEKFFPDVIKIHWQEKKSNTILGSQEGNTMKTNDTYMKFSWLTVPEKSLDKEHRCIVRHENNKNGVDQEIIFPPIKTDVITMDPKDNCSKDANDTLLLQLTNTSAYYMYLLLLLKSVVYFAIITCCLLRRTAFCCNGEKSRAKRSGSGATNFSLLKQAGDVEENPGPTSMDWIWRILFLVGAATGAHSFEQVQLQQPGAELVKPGASVKMSCKASGYAFSSYWINWMKQKPGQGLEWIGQIYPGDGDTNYNGKFKGRATLTADTSSSTAYMQLSSLTSEDSAVYFCARSITTVVGCAMDYWGQGTSVTVSSTRPHTKPSVFVMKNGTNVACLVKEFYPKDIRINLVSSKKITEFDPAIVISPSGKYNAVKLGKYEDSNSVTCSVQHDNKTVHSTDFEVKTDSTDHVKPKETENTKQPSKSCHKPKAIVHTEKVNMMSLTVLGLRMLFAKTVAVNFLLTAKLFFLRAKRSGSGVKQTLNFDLLKLAGDVESNPGPSRGHMTEYKPTVRLATRDDVPRAVRTLAAAFADYPATRHTVDPDRHIERVTELQELFLTRVGLDIGKVWVADDGAAVAVWTTPESVEAGAVFAEIGPRMAELSGSRLAAQQQMEGLLAPHRPKEPAWFLATVGVSPDHQGKGLGSAVVLPGVEAAERAGVPAFLETSAPRNLPFYERLGFTVTADVEVPEGPRTWCMTRKPGA

SEQ ID NO: 8314 - protein, 853 aa, Artificial Sequence
  Synthetic Polypeptide
MALPVTALLLPLALLLHAARPDIQMTQSPSSLSASVGDRVTITCKASDHINNWLAWYQQKPGQAPKLLIYGATTLETGVPSRFSGSGSGTDYTLTISSLQPEDFATYYCQQSWNTPWTFGQGTKLEIKRLESPKPTIFLPSIAETKLQKAGTYLCLLEKFFPDVIKIHWQEKKSNTILGSQEGNTMKTNDTYMKFSWLTVPEKSLDKEHRCIVRHENNKNGVDQEIIFPPIKTDVITMDPKDNCSKDANDTLLLQLTNTSAYYMYLLLLLKSVVYFAIITCCLLRRTAFCCNGEKSRAKRSGSGATNFSLLKQAGDVEENPGPTSMDWIWRILFLVGAATGAHSFEQVQLQQPGAELVKPGASVKMSCKASGYAFSSYWINWMKQKPGQGLEWIGQIYPGDGDTNYNGKFKGRATLTADTSSSTAYMQLSSLTSEDSAVYFCARSITTVVGCAMDYWGQGTSVTVSSTRPHTKPSVFVMKNGTNVACLVKEFYPKDIRINLVSSKKITEFDPAIVISPSGKYNAVKLGKYEDSNSVTCSVQHDNKTVHSTDFEVKTDSTDHVKPKETENTKQPSKSCHKPKAIVHTEKVNMMSLTVLGLRMLFAKTVAVNFLLTAKLFFLRAKRSGSGVKQTLNFDLLKLAGDVESNPGPSRGHMTEYKPTVRLATRDDVPRAVRTLAAAFADYPATRHTVDPDRHIERVTELQELFLTRVGLDIGKVWVADDGAAVAVWTTPESVEAGAVFAEIGPRMAELSGSRLAAQQQMEGLLAPHRPKEPAWFLATVGVSPDHQGKGLGSAVVLPGVEAAERAGVPAFLETSAPRNLPFYERLGFTVTADVEVPEGPRTWCMTRKPGA

SEQ ID NO: 8315 - protein, 850 aa, Artificial Sequence
  Synthetic Polypeptide
MALPVTALLLPLALLLHAARPDIQMTQSPSSLSASVGDRVTITCKASDHINNWLAWYQQKPGQAPKLLIYGATTLETGVPSRFSGSGSGTDYTLTISSLQPEDFATYYCQQSWNTPWTFGQGTKLEIKRLEPTIFLPSIAETKLQKAGTYLCLLEKFFPDVIKIHWQEKKSNTILGSQEGNTMKTNDTYMKFSWLTVPEKSLDKEHRCIVRHENNKNGVDQEIIFPPIKTDVITMDPKDNCSKDANDTLLLQLTNTSAYYMYLLLLLKSVVYFAIITCCLLRRTAFCCNGEKSRAKRSGSGATNFSLLKQAGDVEENPGPTSMDWIWRILFLVGAATGAHSFEQVQLQQPGAELVKPGASVKMSCKASGYAFSSYWINWMKQKPGQGLEWIGQIYPGDGDTNYNGKFKGRATLTADTSSSTAYMQLSSLTSEDSAVYFCARSITTVVGCAMDYWGQGTSVTVSSTRPHTKPSVFVMKNGTNVACLVKEFYPKDIRINLVSSKKITEFDPAIVISPSGKYNAVKLGKYEDSNSVTCSVQHDNKTVHSTDFEVKTDSTDHVKPKETENTKQPSKSCHKPKAIVHTEKVNMMSLTVLGLRMLFAKTVAVNFLLTAKLFFLRAKRSGSGVKQTLNFDLLKLAGDVESNPGPSRGHMTEYKPTVRLATRDDVPRAVRTLAAAFADYPATRHTVDPDRHIERVTELQELFLTRVGLDIGKVWVADDGAAVAVWTTPESVEAGAVFAEIGPRMAELSGSRLAAQQQMEGLLAPHRPKEPAWFLATVGVSPDHQGKGLGSAVVLPGVEAAERAGVPAFLETSAPRNLPFYERLGFTVTADVEVPEGPRTWCMTRKPGA

SEQ ID NO: 8316 - protein, 836 aa, Artificial Sequence
  Synthetic Polypeptide
MALPVTALLLPLALLLHAARPDIQMTQSPSSLSASVGDRVTITCKASDHINNWLAWYQQKPGQAPKLLIYGATTLETGVPSRFSGSGSGTDYTLTISSLQPEDFATYYCQQSWNTPWTFGQGTKLEIKRLEALYRRDKAPEGRHLPVPAGKVLPRCDDPLAGKEVQHHPGQPGRQHHEDQRHLHEVQLADRAREVPGQRTQMHRAARKQQERRGPGNHLPTHQDRCDYNGPQGQLLQGRQRYPAAPADQHQRLLHVLVAAAEVRGVLRHHHMLPAAENRLLLQRREVGQAIWIWSNKLLTTQTSRRGGESRAYYGLDLAHPFPCRRCYRRAFLRTSSASTAWRAGQTWRFCEDELQSQRLRLQQLLDQLDEAETRPGTRMDRPNLSRRRRHQLQRQVQGQSHTDRRYLQHSLHAAEQPDQRRRRVLLCPVHHNSRGLRYGLLGPGNKRDRVYASSHQAQRVRDEERHQRGLPRERVLPQGHQDQPGVQQEDHRVRPRHRDLPQRQVQRREAGEVRGQQQRDLLRAARQQDRAQHRLSENRLHRPREAQRDREHQAAQQELPQAQGHRAHRESEHDEPDRAGPADAVRQNRGRELPADRQAVLPPRQEKRIWREADPEFRPAEAGWRRGIQPRPFRPYDRVQAHGAPRHPRRRPQGRTHPRRRVRRLPRHAPHRRSGPPHRAGHRAARTLPHARRARHRQGVGRGRRRRGGGLDHAGERRSGGGVRRDRPAHGRVERFPAGRAATDGRPPGAAPAQGARVVPGHRRRLARPPGQGSGQRRRAPRSGGGRARRGARLPGDLRAPQPPLLRAARLHRHRRRRGARRTAHLVHDPQARCL

SEQ ID NO: 8317 - protein, 840 aa, Artificial Sequence
  Synthetic Polypeptide
MALPVTALLLPLALLLHAARPDIQMTQSPSSLSASVGDRVTITCKASDHINNWLAWYQQKPGQAPKLLIYGATTLETGVPSRFSGSGSGTDYTLTISSLQPEDFATYYCQQSWNTPWTFGQGTKLEIKRLETKLQKAGTYLCLLEKFFPDVIKIHWQEKKSNTILGSQEGNTMKTNDTYMKFSWLTVPEKSLDKEHRCIVRHENNKNGVDQEIIFPPIKTDVITMDPKDNCSKDANDTLLLQLTNTSAYYMYLLLLLKSVVYFAIITCCLLRRTAFCCNGEKSRAKRSGSGATNFSLLKQAGDVEENPGPTSMDWIWRILFLVGAATGAHSFEQVQLQQPGAELVKPGASVKMSCKASGYAFSSYWINWMKQKPGQGLEWIGQIYPGDGDTNYNGKFKGRATLTADTSSSTAYMQLSSLTSEDSAVYFCARSITTVVGCAMDYWGQGTSVTVSSTRPHTKPSVFVMKNGTNVACLVKEFYPKDIRINLVSSKKITEFDPAIVISPSGKYNAVKLGKYEDSNSVTCSVQHDNKTVHSTDFEVKTDSTDHVKPKETENTKQPSKSCHKPKAIVHTEKVNMMSLTVLGLRMLFAKTVAVNFLLTAKLFFLRAKRSGSGVKQTLNFDLLKLAGDVESNPGPSRGHMTEYKPTVRLATRDDVPRAVRTLAAAFADYPATRHTVDPDRHIERVTELQELFLTRVGLDIGKVWVADDGAAVAVWTTPESVEAGAVFAEIGPRMAELSGSRLAAQQQMEGLLAPHRPKEPAWFLATVGVSPDHQGKGLGSAVVLPGVEAAERAGVPAFLETSAPRNLPFYERLGFTVTADVEVPEGPRTWCMTRKPGA

SEQ ID NO: 8318 - protein, 1152 aa, Artificial Sequence
  Synthetic Polypeptide
MALPVTALLLPLALLLHAARPACEVQLLESGGGLIQPGGSLRLSCAASGFTFSSHAMTWVRQAPGKGLEWVSAISGSGDYTHYADSVKGRFTISRDNSKNTVYLQMNSLRAEDSAVYYCAKDEDGGSLLGHRGQGTLVTVSSGTGGGGSGGGGSGGGGSEFGMRTEDLPKAVVFLEPQWYRVLEKDSVTLKCQGAYSPEDNSTQWFHNESLISSQASSYFIDAATVDDSGEYRCQTNLSTLSDPVQLEVHIGWLLLQAPRWVFKEEDPIHLRCHSWKNTALHKVTYLQNGKGRKYFHHNSDFYIPKATLKDSGSYFCRGLVGSKNVSSETVNITITQGLAVSTISSFFPPGYQVSFCLVMVLLFAVDTGLYFSVKTNIRSSTRDWKDHKFKWRKDPQDKRAKRSGSGATNFSLLKQAGDVEENPGPTSATMDWIWRILFLVGAATGAHSGPEVQLVESGGGLVQAGGSLRLSCAASGRTFSMGWFRQAPGKEREFVAAITYSGGSPYYADSVKGRFTISRDNAKNTVYLQMNSLKPEDTAVYYCAANPTYGSDWNAENWGQGTQVTVSSGSGGGGSGGGGSGGGGSFEGSTRHEGVHRKPSLLAHPGRLVKSEETVILQCWSDVMFEHFLLHREGMFNDTLRLIGEHHDGVSKANFSISRMTQDLAGTYRCYGSVTHSPYQVSAPSDPLDIVIIGLYEKPSLSAQLGPTVLAGENVTLSCSSRSSYDMYHLSREGEAHERRLPAGPKVNGTFQADFPLGPATHGGTYRCFGSFHDSPYEWSKSSDPLLVSVTGNPSNSWPSPTEPSSKTGNPRHLHILIGTSVVIILFILLFFLLHRWCSNKKNAAVMDQESAGNRTANSEDSDEQDPQEVTYTQLNHCVFTQRKITRPSQRPKTPPTDIIVYTELPNAESRSKVVSCPRAKRSGSGVKQTLNFDLLKLAGDVESNPGPSRGHMTEYKPTVRLATRDDVPRAVRTLAAAFADYPATRHTVDPDRHIERVTELQELFLTRVGLDIGKVWVADDGAAVAVWTTPESVEAGAVFAEIGPRMAELSGSRLAAQQQMEGLLAPHRPKEPAWFLATVGVSPDHQGKGLGSAVVLPGVEAAERAGVPAFLETSAPRNLPFYERLGFTVTADVEVPEGPRTWCMTRKPGA

SEQ ID NO: 8319 - protein, 1074 aa, Artificial Sequence
  Synthetic Polypeptide
MALPVTALLLPLALLLHAARPACEVQLLESGGGLIQPGGSLRLSCAASGFTFSSHAMTWVRQAPGKGLEWVSAISGSGDYTHYADSVKGRFTISRDNSKNTVYLQMNSLRAEDSAVYYCAKDEDGGSLLGHRGQGTLVTVSSGTGGGGSGGGGSGGGGSEFGMRTEDLPKAVVFLEPQWYRVLEKDSVTLKCQGAYSPEDNSTQWFHNESLISSQASSYFIDAATVDDSGEYRCQTNLSTLSDPVQLEVHIGWLLLQAPRWVFKEEDPIHLRCHSWKNTALHKVTYLQNGKGRKYFHHNSDFYIPKATLKDSGSYFCRGLVGSKNVSSETVNITITQGLAVSTISSFFPPGYQVSFCLVMVLLFAVDTGLYFSVKTNIRSSTRDWKDHKFKWRKDPQDKRAKRSGSGATNFSLLKQAGDVEENPGPTSATMDWIWRILFLVGAATGAHSGPEVQLVESGGGLVQAGGSLRLSCAASGRTFSMGWFRQAPGKEREFVAAITYSGGSPYYADSVKGRFTISRDNAKNTVYLQMNSLKPEDTAVYYCAANPTYGSDWNAENWGQGTQVTVSSGSGGGGSGGGGSGGGGSFEGSTRLHCVGDTYPSNDRCCHECRPGNGMVSRCSRSQNTVCRPCGPGFYNDVVSSKPCKPCTWCNLRSGSERKQLCTATQDTVCRCRAGTQPLDSYKPGVDCAPCPPGHFSPGDNQACKPWTNCTLAGKHTLQPASNSSDAICEDRDPPATQPQETQGPPARPITVQPTEAWPRTSQGPSTRPVEVPGGRAVAAILGLGLVLGLLGPLAILLALYLLRRDQRLPPDAHKPPGGGSFRTPIQEEQADAHSTLAKIRAKRSGSGVKQTLNFDLLKLAGDVESNPGPSRGHMTEYKPTVRLATRDDVPRAVRTLAAAFADYPATRHTVDPDRHIERVTELQELFLTRVGLDIGKVWVADDGAAVAVWTTPESVEAGAVFAEIGPRMAELSGSRLAAQQQMEGLLAPHRPKEPAWFLATVGVSPDHQGKGLGSAVVLPGVEAAERAGVPAFLETSAPRNLPFYERLGFTVTADVEVPEGPRTWCMTRKPGA

SEQ ID NO: 8320 - protein, 858 aa, Artificial Sequence
  Synthetic Polypeptide
MALPVTALLLPLALLLHAARPDIQMTQSPSSLSASVGDRVTITCKASDHINNWLAWYQQKPGQAPKLLIYGATTLETGVPSRFSGSGSGTDYTLTISSLQPEDFATYYCQQSWNTPWTFGQGTKLEIKRLELDADVSPKPTIFLPSIAETKLQKAGTYLCLLEKFFPDVIKIHWQEKKSNTILGSQEGNTMKTNDTYMKFSWLTVPEKSLDKEHRCIVRHENNKNGVDQEIIFPPIKTDVITMDPKDNCSKDANDTLLLQLTNTSAYYMYLLLLLKSVVYFAIITCCLLRRTAFCCNGEKSRAKRSGSGATNFSLLKQAGDVEENPGPTSMDWIWRILFLVGAATGAHSFEQVQLQQPGAELVKPGASVKMSCKASGYAFSSYWINWMKQKPGQGLEWIGQIYPGDGDTNYNGKFKGRATLTADTSSSTAYMQLSSLTSEDSAVYFCARSITTVVGCAMDYWGQGTSVTVSSTRPHTKPSVFVMKNGTNVACLVKEFYPKDIRINLVSSKKITEFDPAIVISPSGKYNAVKLGKYEDSNSVTCSVQHDNKTVHSTDFEVKTDSTDHVKPKETENTKQPSKSCHKPKAIVHTEKVNMMSLTVLGLRMLFAKTVAVNFLLTAKLFFLRAKRSGSGVKQTLNFDLLKLAGDVESNPGPSRGHMTEYKPTVRLATRDDVPRAVRTLAAAFADYPATRHTVDPDRHIERVTELQELFLTRVGLDIGKVWVADDGAAVAVWTTPESVEAGAVFAEIGPRMAELSGSRLAAQQQMEGLLAPHRPKEPAWFLATVGVSPDHQGKGLGSAVVLPGVEAAERAGVPAFLETSAPRNLPFYERLGFTVTADVEVPEGPRTWCMTRKPGA

SEQ ID NO: 8321 - protein, 857 aa, Artificial Sequence
  Synthetic Polypeptide
MALPVTALLLPLALLLHAARPDIQMTQSPSSLSASVGDRVTITCKASDHINNWLAWYQQKPGQAPKLLIYGATTLETGVPSRFSGSGSGTDYTLTISSLQPEDFATYYCQQSWNTPWTFGQGTKLEIKRLEDADVSPKPTIFLPSIAETKLQKAGTYLCLLEKFFPDVIKIHWQEKKSNTILGSQEGNTMKTNDTYMKFSWLTVPEKSLDKEHRCIVRHENNKNGVDQEIIFPPIKTDVITMDPKDNCSKDANDTLLLQLTNTSAYYMYLLLLLKSVVYFAIITCCLLRRTAFCCNGEKSRAKRSGSGATNFSLLKQAGDVEENPGPTSMDWIWRILFLVGAATGAHSFEQVQLQQPGAELVKPGASVKMSCKASGYAFSSYWINWMKQKPGQGLEWIGQIYPGDGDTNYNGKFKGRATLTADTSSSTAYMQLSSLTSEDSAVYFCARSITTVVGCAMDYWGQGTSVTVSSTRPHTKPSVFVMKNGTNVACLVKEFYPKDIRINLVSSKKITEFDPAIVISPSGKYNAVKLGKYEDSNSVTCSVQHDNKTVHSTDFEVKTDSTDHVKPKETENTKQPSKSCHKPKAIVHTEKVNMMSLTVLGLRMLFAKTVAVNFLLTAKLFFLRAKRSGSGVKQTLNFDLLKLAGDVESNPGPSRGHMTEYKPTVRLATRDDVPRAVRTLAAAFADYPATRHTVDPDRHIERVTELQELFLTRVGLDIGKVWVADDGAAVAVWTTPESVEAGAVFAEIGPRMAELSGSRLAAQQQMEGLLAPHRPKEPAWFLATVGVSPDHQGKGLGSAVVLPGVEAAERAGVPAFLETSAPRNLPFYERLGFTVTADVEVPEGPRTWCMTRKPGA

SEQ ID NO: 8322 - protein, 830 aa, Artificial Sequence
  Synthetic Polypeptide
MALPVTALLLPLALLLHAARPDIQMTQSPSSLSASVGDRVTITCKASDHINNWLAWYQQKPGQAPKLLIYGATTLETGVPSRFSGSGSGTDYTLTISSLQPEDFATYYCQQSWNTPWTFGQGTKLEIKRLECLLEKFFPDVIKIHWQEKKSNTILGSQEGNTMKTNDTYMKFSWLTVPEKSLDKEHRCIVRHENNKNGVDQEIIFPPIKTDVITMDPKDNCSKDANDTLLLQLTNTSAYYMYLLLLLKSVVYFAIITCCLLRRTAFCCNGEKSRAKRSGSGATNFSLLKQAGDVEENPGPTSMDWIWRILFLVGAATGAHSFEQVQLQQPGAELVKPGASVKMSCKASGYAFSSYWINWMKQKPGQGLEWIGQIYPGDGDTNYNGKFKGRATLTADTSSSTAYMQLSSLTSEDSAVYFCARSITTVVGCAMDYWGQGTSVTVSSTRPHTKPSVFVMKNGTNVACLVKEFYPKDIRINLVSSKKITEFDPAIVISPSGKYNAVKLGKYEDSNSVTCSVQHDNKTVHSTDFEVKTDSTDHVKPKETENTKQPSKSCHKPKAIVHTEKVNMMSLTVLGLRMLFAKTVAVNFLLTAKLFFLRAKRSGSGVKQTLNFDLLKLAGDVESNPGPSRGHMTEYKPTVRLATRDDVPRAVRTLAAAFADYPATRHTVDPDRHIERVTELQELFLTRVGLDIGKVWVADDGAAVAVWTTPESVEAGAVFAEIGPRMAELSGSRLAAQQQMEGLLAPHRPKEPAWFLATVGVSPDHQGKGLGSAVVLPGVEAAERAGVPAFLETSAPRNLPFYERLGFTVTADVEVPEGPRTWCMTRKPGA

SEQ ID NO: 8323 - protein, 852 aa, Artificial Sequence
  Synthetic Polypeptide
MALPVTALLLPLALLLHAARPDIQMTQSPSSLSASVGDRVTITCKASDHINNWLAWYQQKPGQAPKLLIYGATTLETGVPSRFSGSGSGTDYTLTISSLQPEDFATYYCQQSWNTPWTFGQGTKLEIKRLEPKPTIFLPSIAETKLQKAGTYLCLLEKFFPDVIKIHWQEKKSNTILGSQEGNTMKTNDTYMKFSWLTVPEKSLDKEHRCIVRHENNKNGVDQEIIFPPIKTDVITMDPKDNCSKDANDTLLLQLTNTSAYYMYLLLLLKSVVYFAIITCCLLRRTAFCCNGEKSRAKRSGSGATNFSLLKQAGDVEENPGPTSMDWIWRILFLVGAATGAHSFEQVQLQQPGAELVKPGASVKMSCKASGYAFSSYWINWMKQKPGQGLEWIGQIYPGDGDTNYNGKFKGRATLTADTSSSTAYMQLSSLTSEDSAVYFCARSITTVVGCAMDYWGQGTSVTVSSTRPHTKPSVFVMKNGTNVACLVKEFYPKDIRINLVSSKKITEFDPAIVISPSGKYNAVKLGKYEDSNSVTCSVQHDNKTVHSTDFEVKTDSTDHVKPKETENTKQPSKSCHKPKAIVHTEKVNMMSLTVLGLRMLFAKTVAVNFLLTAKLFFLRAKRSGSGVKQTLNFDLLKLAGDVESNPGPSRGHMTEYKPTVRLATRDDVPRAVRTLAAAFADYPATRHTVDPDRHIERVTELQELFLTRVGLDIGKVWVADDGAAVAVWTTPESVEAGAVFAEIGPRMAELSGSRLAAQQQMEGLLAPHRPKEPAWFLATVGVSPDHQGKGLGSAVVLPGVEAAERAGVPAFLETSAPRNLPFYERLGFTVTADVEVPEGPRTWCMTRKPGA

SEQ ID NO: 8324 - protein, 835 aa, Artificial Sequence
  Synthetic Polypeptide
MALPVTALLLPLALLLHAARPDIQMTQSPSSLSASVGDRVTITCKASDHINNWLAWYQQKPGQAPKLLIYGATTLETGVPSRFSGSGSGTDYTLTISSLQPEDFATYYCQQSWNTPWTFGQGTKLEIKRLEAGTYLCLLEKFFPDVIKIHWQEKKSNTILGSQEGNTMKTNDTYMKFSWLTVPEKSLDKEHRCIVRHENNKNGVDQEIIFPPIKTDVITMDPKDNCSKDANDTLLLQLTNTSAYYMYLLLLLKSVVYFAIITCCLLRRTAFCCNGEKSRAKRSGSGATNFSLLKQAGDVEENPGPTSMDWIWRILFLVGAATGAHSFEQVQLQQPGAELVKPGASVKMSCKASGYAFSSYWINWMKQKPGQGLEWIGQIYPGDGDTNYNGKFKGRATLTADTSSSTAYMQLSSLTSEDSAVYFCARSITTVVGCAMDYWGQGTSVTVSSTRPHTKPSVFVMKNGTNVACLVKEFYPKDIRINLVSSKKITEFDPAIVISPSGKYNAVKLGKYEDSNSVTCSVQHDNKTVHSTDFEVKTDSTDHVKPKETENTKQPSKSCHKPKAIVHTEKVNMMSLTVLGLRMLFAKTVAVNFLLTAKLFFLRAKRSGSGVKQTLNFDLLKLAGDVESNPGPSRGHMTEYKPTVRLATRDDVPRAVRTLAAAFADYPATRHTVDPDRHIERVTELQELFLTRVGLDIGKVWVADDGAAVAVWTTPESVEAGAVFAEIGPRMAELSGSRLAAQQQMEGLLAPHRPKEPAWFLATVGVSPDHQGKGLGSAVVLPGVEAAERAGVPAFLETSAPRNLPFYERLGFTVTADVEVPEGPRTWCMTRKPGA

SEQ ID NO: 8325 - protein, 1093 aa, Artificial Sequence
  Synthetic Polypeptide
MALPVTALLLPLALLLHAARPACEVQLLESGGGLIQPGGSLRLSCAASGFTFSSHAMTWVRQAPGKGLEWVSAISGSGDYTHYADSVKGRFTISRDNSKNTVYLQMNSLRAEDSAVYYCAKDEDGGSLLGHRGQGTLVTVSSGTGGGGSGGGGSGGGGSEFGMRTEDLPKAVVFLEPQWYRVLEKDSVTLKCQGAYSPEDNSTQWFHNESLISSQASSYFIDAATVDDSGEYRCQTNLSTLSDPVQLEVHIGWLLLQAPRWVFKEEDPIHLRCHSWKNTALHKVTYLQNGKGRKYFHHNSDFYIPKATLKDSGSYFCRGLVGSKNVSSETVNITITQGLAVSTISSFFPPGYQVSFCLVMVLLFAVDTGLYFSVKTNIRSSTRDWKDHKFKWRKDPQDKRAKRSGSGATNFSLLKQAGDVEENPGPTSATMDWIWRILFLVGAATGAHSGPEVQLVESGGGLVQAGGSLRLSCAASGRTFSMGWFRQAPGKEREFVAAITYSGGSPYYADSVKGRFTISRDNAKNTVYLQMNSLKPEDTAVYYCAANPTYGSDWNAENWGQGTQVTVSSGSGGGGSGGGGSGGGGSFEGSTRTPAAPPKAVLKLEPQWINVLQEDSVTLTCRGTHSPESDSIQWFHNGNLIPTHTQPSYRFKANNNDSGEYTCQTGQTSLSDPVHLTVLSEWLVLQTPHLEFQEGETIVLRCHSWKDKPLVKVTFFQNGKSKKFSRSDPNFSIPQANHSHSGDYHCTGNIGYTLYSSKPVTITVQAPSSSPMGIIVAVVTGIAVAAIVAAVVALIYCRKKRISALPGYPECREMGETLPEKPANPTNPDEADKVGAENTITYSLLMHPDALEEPDDQNRIRAKRSGSGVKQTLNFDLLKLAGDVESNPGPSRGHMTEYKPTVRLATRDDVPRAVRTLAAAFADYPATRHTVDPDRHIERVTELQELFLTRVGLDIGKVWVADDGAAVAVWTTPESVEAGAVFAEIGPRMAELSGSRLAAQQQMEGLLAPHRPKEPAWFLATVGVSPDHQGKGLGSAVVLPGVEAAERAGVPAFLETSAPRNLPFYERLGFTVTADVEVPEGPRTWCMTRKPGA

SEQ ID NO: 8326 - protein, 854 aa, Artificial Sequence
  Synthetic Polypeptide
MALPVTALLLPLALLLHAARPDIQMTQSPSSLSASVGDRVTITCKASDHINNWLAWYQQKPGQAPKLLIYGATTLETGVPSRFSGSGSGTDYTLTISSLQPEDFATYYCQQSWNTPWTFGQGTKLEIKRLEADVSPKPTIFLPSIAETKLQKAGTYLCLLEKFFPDVIKIHWQEKKSNTILGSQEGNTMKTNDTYMKFSWLTVPEKSLDKEHRCIVRHENNKNGVDQEIIFPPIKTDVITMDPKDNCSKDANDTLLLQLTNTSAYYMYLLLLLKSVVYFAIITCCLLRRTAFCCNGEKSRAKRSGSGATNFSLLKQAGDVEENPGPTSMDWIWRILFLVGAATGAHSFEQVQLQQPGAELVKPGASVKMSCKASGYAFSSYWINWMKQKPGQGLEWIGQIYPGDGDTNYNGKFKGRATLTADTSSSTAYMQLSSLTSEDSAVYFCARSITTVVGCAMDYWGQGTSVTVSSTRTKPSVFVMKNGTNVACLVKEFYPKDIRINLVSSKKITEFDPAIVISPSGKYNAVKLGKYEDSNSVTCSVQHDNKTVHSTDFEVKTDSTDHVKPKETENTKQPSKSCHKPKAIVHTEKVNMMSLTVLGLRMLFAKTVAVNFLLTAKLFFLRAKRSGSGVKQTLNFDLLKLAGDVESNPGPSRGHMTEYKPTVRLATRDDVPRAVRTLAAAFADYPATRHTVDPDRHIERVTELQELFLTRVGLDIGKVWVADDGAAVAVWTTPESVEAGAVFAEIGPRMAELSGSRLAAQQQMEGLLAPHRPKEPAWFLATVGVSPDHQGKGLGSAVVLPGVEAAERAGVPAFLETSAPRNLPFYERLGFTVTADVEVPEGPRTWCMTRKPGA

SEQ ID NO: 8327 - protein, 863 aa, Artificial Sequence
  Synthetic Polypeptide
MALPVTALLLPLALLLHAARPDIQMTQSPSSLSASVGDRVTITCKASDHINNWLAWYQQKPGQAPKLLIYGATTLETGVPSRFSGSGSGTDYTLTISSLQPEDFATYYCQQSWNTPWTFGQGTKLEIKRLEDKQLDADVSPKPTIFLPSIAETKLQKAGTYLCLLEKFFPDVIKIHWQEKKSNTILGSQEGNTMKTNDTYMKFSWLTVPEKSLDKEHRCIVRHENNKNGVDQEIIFPPIKTDVITMDPKDNCSKDANDTLLLQLTNTSAYYMYLLLLLKSVVYFAIITCCLLRRTAFCCNGEKSRAKRSGSGATNFSLLKQAGDVEENPGPTSMDWIWRILFLVGAATGAHSFEQVQLQQPGAELVKPGASVKMSCKASGYAFSSYWINWMKQKPGQGLEWIGQIYPGDGDTNYNGKFKGRATLTADTSSSTAYMQLSSLTSEDSAVYFCARSITTVVGCAMDYWGQGTSVTVSSTRSQPHTKPSVFVMKNGTNVACLVKEFYPKDIRINLVSSKKITEFDPAIVISPSGKYNAVKLGKYEDSNSVTCSVQHDNKTVHSTDFEVKTDSTDHVKPKETENTKQPSKSCHKPKAIVHTEKVNMMSLTVLGLRMLFAKTVAVNFLLTAKLFFLRAKRSGSGVKQTLNFDLLKLAGDVESNPGPSRGHMTEYKPTVRLATRDDVPRAVRTLAAAFADYPATRHTVDPDRHIERVTELQELFLTRVGLDIGKVWVADDGAAVAVWTTPESVEAGAVFAEIGPRMAELSGSRLAAQQQMEGLLAPHRPKEPAWFLATVGVSPDHQGKGLGSAVVLPGVEAAERAGVPAFLETSAPRNLPFYERLGFTVTADVEVPEGPRTWCMTRKPGA

SEQ ID NO: 8328 - protein, 787 aa, Artificial Sequence
  Synthetic Polypeptide
MALPVTALLLPLALLLHAARPDIQMTQSPSSLSASVGDRVTITCKASDHINNWLAWYQQKPGQAPKLLIYGATTLETGVPSRFSGSGSGTDYTLTISSLQPEDFATYYCQQSWNTPWTFGQGTKLEIKRGGGGSGGGGSGGGGSQVQLQQPGAELVKPGASVKMSCKASGYAFSSYWINWMKQKPGQGLEWIGQIYPGDGDTNYNGKFKGRATLTADTSSSTAYMQLSSLTSEDSAVYFCARSITTVVGCAMDYWGQGTSVTVSSTRGGSGQQQTLPKPFIWAEPHFMVPKEKQVTICCQGNYGAVEYQLHFEGSLFAVDRPKPPERINKVQFYIPDMNSRMAGQYSCIYRVGELWSEPSNLLDLVVTEMYDTPTLSVHPGPEVISGEKVTFYCRLDTATSMFLLLKEGRSSHVQRGYGKVQAEFPLGPVTTAHRGTYRCFGSYNNHAWSFPSEPVKLLVTGDIENTSLAPEDPTFPADTWGTYLLTTETGLQKDHALWDHTAQNLLRMGLAFLVLVALVWFLVEDWLSRKRTRERASRASTWEGRRRLNTQTLRAKRSGSGVKQTLNFDLLKLAGDVESNPGPSRGHMTEYKPTVRLATRDDVPRAVRTLAAAFADYPATRHTVDPDRHIERVTELQELFLTRVGLDIGKVWVADDGAAVAVWTTPESVEAGAVFAEIGPRMAELSGSRLAAQQQMEGLLAPHRPKEPAWFLATVGVSPDHQGKGLGSAVVLPGVEAAERAGVPAFLETSAPRNLPFYERLGFTVTADVEVPEGPRTWCMTRKPGA

SEQ ID NO: 8329 - protein, 680 aa, Artificial Sequence
  Synthetic Polypeptide
MALPVTALLLPLALLLHAARPDIQMTQSPSSLSASVGDRVTITCKASDHINNWLAWYQQKPGQAPKLLIYGATTLETGVPSRFSGSGSGTDYTLTISSLQPEDFATYYCQQSWNTPWTFGQGTKLEIKRGGGGSGGGGSGGGGSQVQLQQPGAELVKPGASVKMSCKASGYAFSSYWINWMKQKPGQGLEWIGQIYPGDGDTNYNGKFKGRATLTADTSSSTAYMQLSSLTSEDSAVYFCARSITTVVGCAMDYWGQGTSVTVSSTRGGSGTQTPYKVSISGTTVILTCPQYPGSEILWQHNDKNIGGDEDDKNIGSDEDHLSLKEFSELEQSGYYVCYPRGSKPEDANFYLYLRARVCENCMEMDVMSVATIVIVDICITGGLLLLVYYWSKNRKAKAKPVTRGAGAGGRQRGQNKERPPPVPNPDYEPIRKGQRDLYSGLNQRRIRAKRSGSGVKQTLNFDLLKLAGDVESNPGPSRDHMTEYKPTVRLATRDDVPRAVRTLAAAFADYPATRHTVDPDRHIERVTELQELFLTRVGLDIGKVWVADDGAAVAVWTTPESVEAGAVFAEIGPRMAELSGSRLAAQQQMEGLLAPHRPKEPAWFLATVGVSPDHQGKGLGSAVVLPGVEAAERAGVPAFLETSAPRNLPFYERLGFTVTADVEVPEGPRTWCMTRKPGA

SEQ ID NO: 8330 - protein, 669 aa, Artificial Sequence
  Synthetic Polypeptide
MALPVTALLLPLALLLHAARPDIQMTQSPSSLSASVGDRVTITCKASDHINNWLAWYQQKPGQAPKLLIYGATTLETGVPSRFSGSGSGTDYTLTISSLQPEDFATYYCQQSWNTPWTFGQGTKLEIKRGGGGSGGGGSGGGGSQVQLQQPGAELVKPGASVKMSCKASGYAFSSYWINWMKQKPGQGLEWIGQIYPGDGDTNYNGKFKGRATLTADTSSSTAYMQLSSLTSEDSAVYFCARSITTVVGCAMDYWGQGTSVTVSSTRGGSGTTVILTCPQYPGSEILWQHNDKNIGGDEDDKNIGSDEDHLSLKEFSELEQSGYYVCYPRGSKPEDANFYLYLRARVCENCMEMDVMSVATIVIVDICITGGLLLLVYYWSKNRKAKAKPVTRGAGAGGRQRGQNKERPPPVPNPDYEPIRKGQRDLYSGLNQRRIRAKRSGSGVKQTLNFDLLKLAGDVESNPGPSRDHMTEYKPTVRLATRDDVPRAVRTLAAAFADYPATRHTVDPDRHIERVTELQELFLTRVGLDIGKVWVADDGAAVAVWTTPESVEAGAVFAEIGPRMAELSGSRLAAQQQMEGLLAPHRPKEPAWFLATVGVSPDHQGKGLGSAVVLPGVEAAERAGVPAFLETSAPRNLPFYERLGFTVTADVEVPEGPRTWCMTRKPGA

SEQ ID NO: 8331 - protein, 974 aa, Artificial Sequence
  Synthetic Polypeptide
MALPVTALLLPLALLLHAARPLPVLTQPPSVSVAPGKTARITCGGNNIGSKSVHWYQQKPGQAPVLVVYDDSDRPSGIPERFSGSNSGNTATLTISRVEAGDEADYYCQVWDSSSDYVVFGGGTKLTVLGQPKANPTVTLFPPSSEELQANKATLVCLISDFYPGAVTVAWKADGSPVKAGVETTKPSKQSNNKYAASSYLSLTPEQWKSHRSYSCQVTHEGSTVEKTVAPTECSGSVVEKEHPQLGAGTVLLLRAGFYAVSFLSVAVGSTVYYQGKCLTWKGPRRQLPAVVPAPLPPPCGSSAHLLPPVPGGRAKRSGSGATNFSLLKQAGDVEENPGPTSMDWIWRILFLVGAATGAHSFEEVQLVQSGAEVKKPGESLKISCKGSGYSFTSYWIGWVRQMPGKGLEWMGIIYPGDSDTRYSPSFQGQVTISADKSISTAYLQWSSLKASDTAMYYCARQVWGWQGGMYPRSNWWYNLDSWGQGTLVTVSSASTKGPSVFPLAPSSKSTSGGTAALGCLVKDYFPEPVTVSWNSGALTSGVHTFPAVLQSSGLYSLSSVVTVPSSSLGTQTYICNVNHKPSNTKVDKRVEPKSCGTQSFGLLDPKLCYLLDGILFIYGVILTALFLRVKFSRSADAPAYQQGQNQLYNELNLGRREEYDVLDKRRGRDPEMGGKPQRRKNPQEGLYNELQKDKMAEAYSEIGMKGERRRGKGHDGLYQGLSTATKDTYDALHMQALPPRRAKRSGSGVKQTLNFDLLKLAGDVESNPGPSRGHMTEYKPTVRLATRDDVPRAVRTLAAAFADYPATRHTVDPDRHIERVTELQELFLTRVGLDIGKVWVADDGAAVAVWTTPESVEAGAVFAEIGPRMAELSGSRLAAQQQMEGLLAPHRPKEPAWFLATVGVSPDHQGKGLGSAVVLPGVEAAERAGVPAFLETSAPRNLPFYERLGFTVTADVEVPEGPRTWCMTRKPGA

SEQ ID NO: 8332 - protein, 1005 aa, Artificial Sequence; identical to SEQ ID NO: 4719
  Synthetic Polypeptide

SEQ ID NO: 8333 - protein, 1054 aa, Artificial Sequence
  Synthetic Polypeptide
MALPVTALLLPLALLLHAARPLPVLTQPPSVSVAPGKTARITCGGNNIGSKSVHWYQQKPGQAPVLVVYDDSDRPSGIPERFSGSNSGNTATLTISRVEAGDEADYYCQVWDSSSDYVVFGGGTKLTVLGQPKANPTVTLFPPSSEELQANKATLVCLISDFYPGAVTVAWKADGSPVKAGVETTKPSKQSNNKYAASSYLSLTPEQWKSHRSYSCQVTHEGSTVEKTVAPTECSGSKSVRFYLVVSPASASTQTSWTPRDLVSSQTQTQSCVPPTAGARQAPESPSTIPVPSQPQNSTLRPGPAAPIALVPVFCGLLVAKSLVLSALLVWWGDIWWKTMMELRSLDTQKATCHLQQVTDLPWTSVSSPVEREILYHTVARTKISDDDDEHTLRAKRSGSGATNFSLLKQAGDVEENPGPTSMDWIWRILFLVGAATGAHSFEEVQLVQSGAEVKKPGESLKISCKGSGYSFTSYWIGWVRQMPGKGLEWMGIIYPGDSDTRYSPSFQGQVTISADKSISTAYLQWSSLKASDTAMYYCARQVWGWQGGMYPRSNWWYNLDSWGQGTLVTVSSASTKGPSVFPLAPSSKSTSGGTAALGCLVKDYFPEPVTVSWNSGALTSGVHTFPAVLQSSGLYSLSSVVTVPSSSLGTQTYICNVNHKPSNTKVDKRVEPKSCGTQSFGLLDPKLCYLLDGILFIYGVILTALFLRVKFSRSADAPAYQQGQNQLYNELNLGRREEYDVLDKRRGRDPEMGGKPQRRKNPQEGLYNELQKDKMAEAYSEIGMKGERRRGKGHDGLYQGLSTATKDTYDALHMQALPPRRAKRSGSGVKQTLNFDLLKLAGDVESNPGPSRGHMTEYKPTVRLATRDDVPRAVRTLAAAFADYPATRHTVDPDRHIERVTELQELFLTRVGLDIGKVWVADDGAAVAVWTTPESVEAGAVFAEIGPRMAELSGSRLAAQQQMEGLLAPHRPKEPAWFLATVGVSPDHQGKGLGSAVVLPGVEAAERAGVPAFLETSAPRNLPFYERLGFTVTADVEVPEGPRTWCMTRKPGA

SEQ ID NO: 8334 - protein, 1141 aa, Artificial Sequence
  Synthetic Polypeptide
ASTMALPVTALLLPLALLLHAARPLPVLTQPPSVSVAPGKTARITCGGNNIGSKSVHWYQQKPGQAPVLVVYDDSDRPSGIPERFSGSNSGNTATLTISRVEAGDEADYYCQVWDSSSDYVVFGGGTKLTVLGQPKANPTVTLFPPSSEELQANKATLVCLISDFYPGAVTVAWKADGSPVKAGVETTKPSKQSNNKYAASSYLSLTPEQWKSHRSYSCQVTHEGSTVEKTVAPTECSLEQSFGLLDPKLCYLLDGILFIYGVILTALFLRVKFSRSADAPAYQQGQNQLYNELNLGRREEYDVLDKRRGRDPEMGGKPQRRKNPQEGLYNELQKDKMAEAYSEIGMKGERRRGKGHDGLYQGLSTATKDTYDALHMQALPPRRAKRSGSGATNFSLLKQAGDVEENPGPTSMDWIWRILFLVGAATGAHSFEEVQLVQSGAEVKKPGESLKISCKGSGYSFTSYWIGWVRQMPGKGLEWMGIIYPGDSDTRYSPSFQGQVTISADKSISTAYLQWSSLKASDTAMYYCARQVWGWQGGMYPRSNWWYNLDSWGQGTLVTVSSASTKGPSVFPLAPSSKSTSGGTAALGCLVKDYFPEPVTVSWNSGALTSGVHTFPAVLQSSGLYSLSSVVTVPSSSLGTQTYICNVNHKPSNTKVDKRVEPKSCTRGMRTEDLPKAVVFLEPQWYRVLEKDSVTLKCQGAYSPEDNSTQWFHNESLISSQASSYFIDAATVDDSGEYRCQTNLSTLSDPVQLEVHIGWLLLQAPRWVFKEEDPIHLRCHSWKNTALHKVTYLQNGKGRKYFHHNSDFYIPKATLKDSGSYFCRGLVGSKNVSSETVNITITQGLAVPTISSFFPPGYQVSFCLVMVLLFAVDTGLYFSVKTNIRSSTRDWKDHKFKWRKDPQDKRAKRSGSGVKQTLNFDLLKLAGDVESNPGPSRGHMTEYKPTVRLATRDDVPRAVRTLAAAFADYPATRHTVDPDRHIERVTELQELFLTRVGLDIGKVWVADDGAAVAVWTTPESVEAGAVFAEIGPRMAELSGSRLAAQQQMEGLLAPHRPKEPAWFLATVGVSPDHQGKGLGSAVVLPGVEAAERAGVPAFLETSAPRNLPFYERLGFTVTADVEVPEGPRTWCMTRKPGAVD

SEQ ID NO: 8335 - protein, 1054 aa, Artificial Sequence
  Synthetic Polypeptide
MALPVTALLLPLALLLHAARPDIQMTQSPSSLSASVGDRVTITCKASDHINNWLAWYQQKPGQAPKLLIYGATTLETGVPSRFSGSGSGTDYTLTISSLQPEDFATYYCQQSWNTPWTFGQGTKLEIKRLEGQPKANPTVTLFPPSSEELQANKATLVCLISDFYPGAVTVAWKADGSPVKAGVETTKPSKQSNNKYAASSYLSLTPEQWKSHRSYSCQVTHEGSTVEKTVAPTECSGSQSFGLLDPKLCYLLDGILFIYGVILTALFLRVKFSRSADAPAYQQGQNQLYNELNLGRREEYDVLDKRRGRDPEMGGKPQRRKNPQEGLYNELQKDKMAEAYSEIGMKGERRRGKGHDGLYQGLSTATKDTYDALHMQALPPRRAKRSGSGATNFSLLKQAGDVEENPGPTSMDWIWRILFLVGAATGAHSFEQVQLQQPGAELVKPGASVKMSCKASGYAFSSYWINWMKQKPGQGLEWIGQIYPGDGDTNYNGKFKGRATLTADTSSSTAYMQLSSLTSEDSAVYFCARSITTVVGCAMDYWGQGTSVTVSSTRASPTSPKVFPLSLCSTQPDGNVVIACLVQGFFPQEPLSVTWSESGQGVTARNFPPSQDASGDLYTTSSQLTLPATQCLAGKSVTCHVKHYTNPSQDVTVPCPVPSTPPTPSPSTPPTPSPSGTQSFGLLDPKLCYLLDGILFIYGVILTALFLRVKFSRSADAPAYQQGQNQLYNELNLGRREEYDVLDKRRGRDPEMGGKPQRRKNPQEGLYNELQKDKMAEAYSEIGMKGERRRGKGHDGLYQGLSTATKDTYDALHMQALPPRRAKRSGSGVKQTLNFDLLKLAGDVESNPGPSRGHMTEYKPTVRLATRDDVPRAVRTLAAAFADYPATRHTVDPDRHIERVTELQELFLTRVGLDIGKVWVADDGAAVAVWTTPESVEAGAVFAEIGPRMAELSGSRLAAQQQMEGLLAPHRPKEPAWFLATVGVSPDHQGKGLGSAVVLPGVEAAERAGVPAFLETSAPRNLPFYERLGFTVTADVEVPEGPRTWCMTRKPGA

SEQ ID NO: 8336 - protein, 1040 aa, Artificial Sequence
  Synthetic Polypeptide
ASTMALPVTALLLPLALLLHAARPDIQMTQSPSSLSASVGDRVTITCKASDHINNWLAWYQQKPGQAPKLLIYGATTLETGVPSRFSGSGSGTDYTLTISSLQPEDFATYYCQQSWNTPWTFGQGTKLEIKRLEGQPKANPTVTLFPPSSEELQANKATLVCLISDFYPGAVTVAWKADGSPVKAGVETTKPSKQSNNKYAASSYLSLTPEQWKSHRSYSCQVTHEGSTVEKTVAPTECSGSQSFGLLDPKLCYLLDGILFIYGVILTALFLRVKFSRSADAPAYQQGQNQLYNELNLGRREEYDVLDKRRGRDPEMGGKPQRRKNPQEGLYNELQKDKMAEAYSEIGMKGERRRGKGHDGLYQGLSTATKDTYDALHMQALPPRRAKRSGSGATNFSLLKQAGDVEENPGPTSMDWIWRILFLVGAATGAHSFEQVQLQQPGAELVKPGASVKMSCKASGYAFSSYWINWMKQKPGQGLEWIGQIYPGDGDTNYNGKFKGRATLTADTSSSTAYMQLSSLTSEDSAVYFCARSITTVVGCAMDYWGQGTSVTVSSTRASTKGPSVFPLAPCSRSTSESTAALGCLVKDYFPEPVTVSWNSGALTSGVHTFPAVLQSSGLYSLSSVVTVPSSNFGTQTYTCNVDHKPSNTKVDKTVERKCGTQSFGLLDPKLCYLLDGILFIYGVILTALFLRVKFSRSADAPAYQQGQNQLYNELNLGRREEYDVLDKRRGRDPEMGGKPQRRKNPQEGLYNELQKDKMAEAYSEIGMKGERRRGKGHDGLYQGLSTATKDTYDALHMQALPPRRAKRSGSGVKQTLNFDLLKLAGDVESNPGPSRGHMTEYKPTVRLATRDDVPRAVRTLAAAFADYPATRHTVDPDRHIERVTELQELFLTRVGLDIGKVWVADDGAAVAVWTTPESVEAGAVFAEIGPRMAELSGSRLAAQQQMEGLLAPHRPKEPAWFLATVGVSPDHQGKGLGSAVVLPGVEAAERAGVPAFLETSAPRNLPFYERLGFTVTADVEVPEGPRTWCMTRKPGAVD

SEQ ID NO: 8337 - protein, 1092 aa, Artificial Sequence
  Synthetic Polypeptide
MALPVTALLLPLALLLHAARPDIQMTQSPSSLSASVGDRVTITCKASDHINNWLAWYQQKPGQAPKLLIYGATTLETGVPSRFSGSGSGTDYTLTISSLQPEDFATYYCQQSWNTPWTFGQGTKLEIKRLEGQPKANPTVTLFPPSSEELQANKATLVCLISDFYPGAVTVAWKADGSPVKAGVETTKPSKQSNNKYAASSYLSLTPEQWKSHRSYSCQVTHEGSTVEKTVAPTECSGSQSFGLLDPKLCYLLDGILFIYGVILTALFLRVKFSRSADAPAYQQGQNQLYNELNLGRREEYDVLDKRRGRDPEMGGKPQRRKNPQEGLYNELQKDKMAEAYSEIGMKGERRRGKGHDGLYQGLSTATKDTYDALHMQALPPRRAKRSGSGATNFSLLKQAGDVEENPGPTSMDWIWRILFLVGAATGAHSFEQVQLQQPGAELVKPGASVKMSCKASGYAFSSYWINWMKQKPGQGLEWIGQIYPGDGDTNYNGKFKGRATLTADTSSSTAYMQLSSLTSEDSAVYFCARSITTVVGCAMDYWGQGTSVTVSSTRAPTKAPDVFPIISGCRHPKDNSPVVLACLITGYHPTSVTVTWYMGTQSQPQRTFPEIQRRDSYYMTSSQLSTPLQQWRQGEYKCVVQHTASKSKKEIFRWPESPKAQASSVPTAQPQAEGSLAKATTAPATTRNTGRGGEEKKKEKEKEEQEERETKTPGTQSFGLLDPKLCYLLDGILFIYGVILTALFLRVKFSRSADAPAYQQGQNQLYNELNLGRREEYDVLDKRRGRDPEMGGKPQRRKNPQEGLYNELQKDKMAEAYSEIGMKGERRRGKGHDGLYQGLSTATKDTYDALHMQALPPRRAKRSGSGVKQTLNFDLLKLAGDVESNPGPSRGHMTEYKPTVRLATRDDVPRAVRTLAAAFADYPATRHTVDPDRHIERVTELQELFLTRVGLDIGKVWVADDGAAVAVWTTPESVEAGAVFAEIGPRMAELSGSRLAAQQQMEGLLAPHRPKEPAWFLATVGVSPDHQGKGLGSAVVLPGVEAAERAGVPAFLETSAPRNLPFYERLGFTVTADVEVPEGPRTWCMTRKPGA

SEQ ID NO: 8338 - protein, 1034 aa, Artificial Sequence
  Synthetic Polypeptide
MALPVTALLLPLALLLHAARPDIQMTQSPSSLSASVGDRVTITCKASDHINNWLAWYQQKPGQAPKLLIYGATTLETGVPSRFSGSGSGTDYTLTISSLQPEDFATYYCQQSWNTPWTFGQGTKLEIKRLEGQPKANPTVTLFPPSSEELQANKATLVCLISDFYPGAVTVAWKADGSPVKAGVETTKPSKQSNNKYAASSYLSLTPEQWKSHRSYSCQVTHEGSTVEKTVAPTECSGSQSFGLLDPKLCYLLDGILFIYGVILTALFLRVKFSRSADAPAYQQGQNQLYNELNLGRREEYDVLDKRRGRDPEMGGKPQRRKNPQEGLYNELQKDKMAEAYSEIGMKGERRRGKGHDGLYQGLSTATKDTYDALHMQALPPRRAKRSGSGATNFSLLKQAGDVEENPGPTSMDWIWRILFLVGAATGAHSFEQVQLQQPGAELVKPGASVKMSCKASGYAFSSYWINWMKQKPGQGLEWIGQIYPGDGDTNYNGKFKGRATLTADTSSSTAYMQLSSLTSEDSAVYFCARSITTVVGCAMDYWGQGTSVTVSSTRASTKGPSVFPLAPCSRSTSESTAALGCLVKDYFPEPVTVSWNSGALTSGVHTFPAVLQSSGLYSLSSVVTVPSSNFGTQTYTCNVDHKPSNTKVDKTVERKGTQSFGLLDPKLCYLLDGILFIYGVILTALFLRVKFSRSADAPAYQQGQNQLYNELNLGRREEYDVLDKRRGRDPEMGGKPQRRKNPQEGLYNELQKDKMAEAYSEIGMKGERRRGKGHDGLYQGLSTATKDTYDALHMQALPPRRAKRSGSGVKQTLNFDLLKLAGDVESNPGPSRGHMTEYKPTVRLATRDDVPRAVRTLAAAFADYPATRHTVDPDRHIERVTELQELFLTRVGLDIGKVWVADDGAAVAVWTTPESVEAGAVFAEIGPRMAELSGSRLAAQQQMEGLLAPHRPKEPAWFLATVGVSPDHQGKGLGSAVVLPGVEAAERAGVPAFLETSAPRNLPFYERLGFTVTADVEVPEGPRTWCMTRKPGA

SEQ ID NO: 8339 - protein, 1043 aa, Artificial Sequence
  Synthetic Polypeptide
MALPVTALLLPLALLLHAARPDIQMTQSPSSLSASVGDRVTITCKASDHINNWLAWYQQKPGQAPKLLIYGATTLETGVPSRFSGSGSGTDYTLTISSLQPEDFATYYCQQSWNTPWTFGQGTKLEIKRLEGQPKANPTVTLFPPSSEELQANKATLVCLISDFYPGAVTVAWKADGSPVKAGVETTKPSKQSNNKYAASSYLSLTPEQWKSHRSYSCQVTHEGSTVEKTVAPTECSGSQSFGLLDPKLCYLLDGILFIYGVILTALFLRVKFSRSADAPAYQQGQNQLYNELNLGRREEYDVLDKRRGRDPEMGGKPQRRKNPQEGLYNELQKDKMAEAYSEIGMKGERRRGKGHDGLYQGLSTATKDTYDALHMQALPPRRAKRSGSGATNFSLLKQAGDVEENPGPTSMDWIWRILFLVGAATGAHSFEQVQLQQPGAELVKPGASVKMSCKASGYAFSSYWINWMKQKPGQGLEWIGQIYPGDGDTNYNGKFKGRATLTADTSSSTAYMQLSSLTSEDSAVYFCARSITTVVGCAMDYWGQGTSVTVSSTRASPTSPKVFPLSLDSTPQDGNVVVACLVQGFFPQEPLSVTWSESGQNVTARNFPPSQDASGDLYTTSSQLTLPATQCPDGKSVTCHVKHYTNPSQDVTVPCPVPPPPPGTQSFGLLDPKLCYLLDGILFIYGVILTALFLRVKFSRSADAPAYQQGQNQLYNELNLGRREEYDVLDKRRGRDPEMGGKPQRRKNPQEGLYNELQKDKMAEAYSEIGMKGERRRGKGHDGLYQGLSTATKDTYDALHMQALPPRRAKRSGSGVKQTLNFDLLKLAGDVESNPGPSRGHMTEYKPTVRLATRDDVPRAVRTLAAAFADYPATRHTVDPDRHIERVTELQELFLTRVGLDIGKVWVADDGAAVAVWTTPESVEAGAVFAEIGPRMAELSGSRLAAQQQMEGLLAPHRPKEPAWFLATVGVSPDHQGKGLGSAVVLPGVEAAERAGVPAFLETSAPRNLPFYERLGFTVTADVEVPEGPRTWCMTRKPGAVD

SEQ ID NO: 8340 - protein, 1036 aa, Artificial Sequence
  Synthetic Polypeptide
MALPVTALLLPLALLLHAARPDIQMTQSPSSLSASVGDRVTITCKASDHINNWLAWYQQKPGQAPKLLIYGATTLETGVPSRFSGSGSGTDYTLTISSLQPEDFATYYCQQSWNTPWTFGQGTKLEIKRLEGQPKANPTVTLFPPSSEELQANKATLVCLISDFYPGAVTVAWKADGSPVKAGVETTKPSKQSNNKYAASSYLSLTPEQWKSHRSYSCQVTHEGSTVEKTVAPTECSGSQSFGLLDPKLCYLLDGILFIYGVILTALFLRVKFSRSADAPAYQQGQNQLYNELNLGRREEYDVLDKRRGRDPEMGGKPQRRKNPQEGLYNELQKDKMAEAYSEIGMKGERRRGKGHDGLYQGLSTATKDTYDALHMQALPPRRAKRSGSGATNFSLLKQAGDVEENPGPTSMDWIWRILFLVGAATGAHSFEQVQLQQPGAELVKPGASVKMSCKASGYAFSSYWINWMKQKPGQGLEWIGQIYPGDGDTNYNGKFKGRATLTADTSSSTAYMQLSSLTSEDSAVYFCARSITTVVGCAMDYWGQGTSVTVSSTRASTQSPSVFPLTRCCKNIPSNATSVTLGCLATGYFPEPVMVTWDTGSLNGTTMTLPATTLTLSGHYATISLLTVSGAWAKQMFTCRVAHTPSSTDWVDNKTFSGTQSFGLLDPKLCYLLDGILFIYGVILTALFLRVKFSRSADAPAYQQGQNQLYNELNLGRREEYDVLDKRRGRDPEMGGKPQRRKNPQEGLYNELQKDKMAEAYSEIGMKGERRRGKGHDGLYQGLSTATKDTYDALHMQALPPRRAKRSGSGVKQTLNFDLLKLAGDVESNPGPSRGHMTEYKPTVRLATRDDVPRAVRTLAAAFADYPATRHTVDPDRHIERVTELQELFLTRVGLDIGKVWVADDGAAVAVWTTPESVEAGAVFAEIGPRMAELSGSRLAAQQQMEGLLAPHRPKEPAWFLATVGVSPDHQGKGLGSAVVLPGVEAAERAGVPAFLETSAPRNLPFYERLGFTVTADVEVPEGPRTWCMTRKPGA

SEQ ID NO: 8341 - protein, 1036 aa, Artificial Sequence
  Synthetic Polypeptide
MALPVTALLLPLALLLHAARPDIQMTQSPSSLSASVGDRVTITCKASDHINNWLAWYQQKPGQAPKLLIYGATTLETGVPSRFSGSGSGTDYTLTISSLQPEDFATYYCQQSWNTPWTFGQGTKLEIKRLEGQPKANPTVTLFPPSSEELQANKATLVCLISDFYPGAVTVAWKADGSPVKAGVETTKPSKQSNNKYAASSYLSLTPEQWKSHRSYSCQVTHEGSTVEKTVAPTECSGSQSFGLLDPKLCYLLDGILFIYGVILTALFLRVKFSRSADAPAYQQGQNQLYNELNLGRREEYDVLDKRRGRDPEMGGKPQRRKNPQEGLYNELQKDKMAEAYSEIGMKGERRRGKGHDGLYQGLSTATKDTYDALHMQALPPRRAKRSGSGATNFSLLKQAGDVEENPGPTSMDWIWRILFLVGAATGAHSFEQVQLQQPGAELVKPGASVKMSCKASGYAFSSYWINWMKQKPGQGLEWIGQIYPGDGDTNYNGKFKGRATLTADTSSSTAYMQLSSLTSEDSAVYFCARSITTVVGCAMDYWGQGTSVTVSSTRASTKGPSVFPLAPCSRSTSESTAALGCLVKDYFPEPVTVSWNSGALTSGVHTFPAVLQSSGLYSLSSVVTVPSSSLGTKTYTCNVDHKPSNTKVDKRVESKYGGTQSFGLLDPKLCYLLDGILFIYGVILTALFLRVKFSRSADAPAYQQGQNQLYNELNLGRREEYDVLDKRRGRDPEMGGKPQRRKNPQEGLYNELQKDKMAEAYSEIGMKGERRRGKGHDGLYQGLSTATKDTYDALHMQALPPRRAKRSGSGVKQTLNFDLLKLAGDVESNPGPSRGHMTEYKPTVRLATRDDVPRAVRTLAAAFADYPATRHTVDPDRHIERVTELQELFLTRVGLDIGKVWVADDGAAVAVWTTPESVEAGAVFAEIGPRMAELSGSRLAAQQQMEGLLAPHRPKEPAWFLATVGVSPDHQGKGLGSAVVLPGVEAAERAGVPAFLETSAPRNLPFYERLGFTVTADVEVPEGPRTWCMTRKPGA

SEQ ID NO: 8342 - protein, 1036 aa, Artificial Sequence
  Synthetic Polypeptide
MALPVTALLLPLALLLHAARPDIQMTQSPSSLSASVGDRVTITCKASDHINNWLAWYQQKPGQAPKLLIYGATTLETGVPSRFSGSGSGTDYTLTISSLQPEDFATYYCQQSWNTPWTFGQGTKLEIKRLEGQPKANPTVTLFPPSSEELQANKATLVCLISDFYPGAVTVAWKADGSPVKAGVETTKPSKQSNNKYAASSYLSLTPEQWKSHRSYSCQVTHEGSTVEKTVAPTECSGSQSFGLLDPKLCYLLDGILFIYGVILTALFLRVKFSRSADAPAYQQGQNQLYNELNLGRREEYDVLDKRRGRDPEMGGKPQRRKNPQEGLYNELQKDKMAEAYSEIGMKGERRRGKGHDGLYQGLSTATKDTYDALHMQALPPRRAKRSGSGATNFSLLKQAGDVEENPGPTSMDWIWRILFLVGAATGAHSFEQVQLQQPGAELVKPGASVKMSCKASGYAFSSYWINWMKQKPGQGLEWIGQIYPGDGDTNYNGKFKGRATLTADTSSSTAYMQLSSLTSEDSAVYFCARSITTVVGCAMDYWGQGTSVTVSSTRASTKGPSVFPLAPCSRSTSESTAALGCLVKDYFPEPVTVSWNSGALTSGVHTFPAVLQSSGLYSLSSVVTVPSSNFGTQTYTCNVDHKPSNTKVDKTVERKCCGTQSFGLLDPKLCYLLDGILFIYGVILTALFLRVKFSRSADAPAYQQGQNQLYNELNLGRREEYDVLDKRRGRDPEMGGKPQRRKNPQEGLYNELQKDKMAEAYSEIGMKGERRRGKGHDGLYQGLSTATKDTYDALHMQALPPRRAKRSGSGVKQTLNFDLLKLAGDVESNPGPSRGHMTEYKPTVRLATRDDVPRAVRTLAAAFADYPATRHTVDPDRHIERVTELQELFLTRVGLDIGKVWVADDGAAVAVWTTPESVEAGAVFAEIGPRMAELSGSRLAAQQQMEGLLAPHRPKEPAWFLATVGVSPDHQGKGLGSAVVLPGVEAAERAGVPAFLETSAPRNLPFYERLGFTVTADVEVPEGPRTWCMTRKPGA

SEQ ID NO: 8343 - protein, 1260 aa, Artificial Sequence
  Synthetic Polypeptide
ASTMALPVTALLLPLALLLHAARPLPVLTQPPSVSVAPGKTARITCGGNNIGSKSVHWYQQKPGQAPVLVVYDDSDRPSGIPERFSGSNSGNTATLTISRVEAGDEADYYCQVWDSSSDYVVFGGGTKLTVLGQPKANPTVTLFPPSSEELQANKATLVCLISDFYPGAVTVAWKADGSPVKAGVETTKPSKQSNNKYAASSYLSLTPEQWKSHRSYSCQVTHEGSTVEKTVAPTECSGSAKPTTTPAPRPPTPAPTIASQPLSLRPEACRPAAGGAVHTRGLDFACDSNLFVASWIAVMIIFRIGMAVAIFCCFFFPSWRRKRKEKQSETSPKEFLTIYEDVKDLKTRRNHEQEQTFPGGGSTIYSMIQSQSSAPTSQEPAYTLYSLIQPSRKSGSRKRNHSPSFNSTIYEVIGKSQPKAQNPARLSRKELENFDVYSTSRVKFSRSADAPAYQQGQNQLYNELNLGRREEYDVLDKRRGRDPEMGGKPQRRKNPQEGLYNELQKDKMAEAYSEIGMKGERRRGKGHDGLYQGLSTATKDTYDALHMQALPPRRAKRSGSGATNFSLLKQAGDVEENPGPMDWIWRILFLVGAATGAHSFEEVQLVQSGAEVKKPGESLKISCKGSGYSFTSYWIGWVRQMPGKGLEWMGIIYPGDSDTRYSPSFQGQVTISADKSISTAYLQWSSLKASDTAMYYCARQVWGWQGGMYPRSNWWYNLDSWGQGTLVTVSSASTKGPSVFPLAPSSKSTSGGTAALGCLVKDYFPEPVTVSWNSGALTSGVHTFPAVLQSSGLYSLSSVVTVPSSSLGTQTYICNVNHKPSNTKVDKRVEPKSCGTTTPGERSSLPAFYPGTSGSCSGCGSLSLPLLAGLVAADAVASLLIVGAVFLCARPRRSPAQEDGKVYINMPGRGSSRRVKFSRSADAPAYQQGQNQLYNELNLGRREEYDVLDKRRGRDPEMGGKPQRRKNPQEGLYNELQKDKMAEAYSEIGMKGERRRGKGHDGLYQGLSTATKDTYDALHMQALPPRRAKRSGSGVKQTLNFDLLKLAGDVESNPGPGHMTEYKPTVRLATRDDVPRAVRTLAAAFADYPATRHTVDPDRHIERVTELQELFLTRVGLDIGKVWVADDGAAVAVWTTPESVEAGAVFAEIGPRMAELSGSRLAAQQQMEGLLAPHRPKEPAWFLATVGVSPDHQGKGLGSAVVLPGVEAAERAGVPAFLETSAPRNLPFYERLGFTVTADVEVPEGPRTWCMTRKPGAVD

SEQ ID NO: 8344 - protein, 1042 aa, Artificial Sequence
  Synthetic Polypeptide
ASTMALPVTALLLPLALLLHAARPDIQMTQSPSSLSASVGDRVTITCKASDHINNWLAWYQQKPGQAPKLLIYGATTLETGVPSRFSGSGSGTDYTLTISSLQPEDFATYYCQQSWNTPWTFGQGTKLEIKRLEGQPKANPTVTLFPPSSEELQANKATLVCLISDFYPGAVTVAWKADGSPVKAGVETTKPSKQSNNKYAASSYLSLTPEQWKSHRSYSCQVTHEGSTVEKTVAPTECSGSQSFGLLDPKLCYLLDGILFIYGVILTALFLRVKFSRSADAPAYQQGQNQLYNELNLGRREEYDVLDKRRGRDPEMGGKPQRRKNPQEGLYNELQKDKMAEAYSEIGMKGERRRGKGHDGLYQGLSTATKDTYDALHMQALPPRRAKRSGSGATNFSLLKQAGDVEENPGPTSMDWIWRILFLVGAATGAHSFEQVQLQQPGAELVKPGASVKMSCKASGYAFSSYWINWMKQKPGQGLEWIGQIYPGDGDTNYNGKFKGRATLTADTSSSTAYMQLSSLTSEDSAVYFCARSITTVVGCAMDYWGQGTSVTVSSTRGSASAPTLFPLVSCENSPSDTSSVAVGCLAQDFLPDSITLSWKYKNNSDISSTRGFPSVLRGGKYAATSQVLLPSKDVMQGTDEHVVCKVQHPNGNKEKNVPLPGTQSFGLLDPKLCYLLDGILFIYGVILTALFLRVKFSRSADAPAYQQGQNQLYNELNLGRREEYDVLDKRRGRDPEMGGKPQRRKNPQEGLYNELQKDKMAEAYSEIGMKGERRRGKGHDGLYQGLSTATKDTYDALHMQALPPRRAKRSGSGVKQTLNFDLLKLAGDVESNPGPSRGHMTEYKPTVRLATRDDVPRAVRTLAAAFADYPATRHTVDPDRHIERVTELQELFLTRVGLDIGKVWVADDGAAVAVWTTPESVEAGAVFAEIGPRMAELSGSRLAAQQQMEGLLAPHRPKEPAWFLATVGVSPDHQGKGLGSAVVLPGVEAAERAGVPAFLETSAPRNLPFYERLGFTVTADVEVPEGPRTWCMTRKPGAVD

SEQ ID NO: 8345 - protein, 903 aa, Artificial Sequence; identical to SEQ ID NO: 3994
  Synthetic Polypeptide

SEQ ID NO: 8346 - protein, 1131 aa, Artificial Sequence
  Synthetic Polypeptide
MALPVTALLLPLALLLHAARPACLWVSQPPEIRTLEGSSAFLPCSFNASQGRLAIGSVTWFRDEVVPGKEVRNGTPEFRGRLAPLASSRFLHDHQAELHIRDVRGHDASIYVCRVEVLGLGVGTGNGTRLVVEKEHPQLGGTGGGGSGGGGSGGGGSEFDIQMTQSPSSLSASVGDRVTITCKASDHINNWLAWYQQKPGQAPKLLIYGATTLETGVPSRFSGSGSGTDYTLTISSLQPEDFATYYCQQSWNTPWTFGQGTKLEIKRLEDLKNVFPPEVAVFEPSEAEISHTQKATLVCLATGFYPDHVELSWWVNGKEVHSGVCTDPQPLKEQPALNDSRYCLSSRLRVSATFWQNPRNHFRCQVQFYGLSENDEWTQDRAKPVTQIVSAEAWGRADCGFTSESYQQGVLSATILYEILLGKATLYAVLVSALVLMAMVKRKDSRGRAKRSGSGATNFSLLKQAGDVEENPGPTSATMDWIWRILFLVGAATGAHSGPLWVSQPPEIRTLEGSSAFLPCSFNASQGRLAIGSVTWFRDEVVPGKEVRNGTPEFRGRLAPLASSRFLHDHQAELHIRDVRGHDASIYVCRVEVLGLGVGTGNGTRLVVEKEHPQLGGSGGGGSGGGGSGGGGSFEQVQLQQPGAELVKPGASVKMSCKASGYAFSSYWINWMKQKPGQGLEWIGQIYPGDGDTNYNGKFKGRATLTADTSSSTAYMQLSSLTSEDSAVYFCARSITTVVGCAMDYWGQGTSVTVSSTRIQNPDPAVYQLRDSKSSDKSVCLFTDFDSQTNVSQSKDSDVYITDKCVLDMRSMDFKSNSAVAWSNKSDFACANAFNNSIIPEDTFFPSPESSCDVKLVEKSFETDTNLNFQNLSVIGFRILLLKVAGFNLLMTLRLWSSRAKRSGSGVKQTLNFDLLKLAGDVESNPGPSRGHMTEYKPTVRLATRDDVPRAVRTLAAAFADYPATRHTVDPDRHIERVTELQELFLTRVGLDIGKVWVADDGAAVAVWTTPESVEAGAVFAEIGPRMAELSGSRLAAQQQMEGLLAPHRPKEPAWFLATVGVSPDHQGKGLGSAVVLPGVEAAERAGVPAFLETSAPRNLPFYERLGFTVTADVEVPEGPRTWCMTRKPGA

SEQ ID NO: 8347 - protein, 846 aa, Artificial Sequence
  Synthetic Polypeptide
MALPVTALLLPLALLLHAARPACQSKAQVLQSVAGQTLTVRCQYPPTGSLYEKKGWCKEASALVCIRLVTSSKPRTMAWTSRFTIWDDPDAGFFTVTMTDLREEDSGHYWCRIYRPSDNSVSLEDLKNVFPPEVAVFEPSEAEISHTQKATLVCLATGFYPDHVELSWWVNGKEVHSGVCTDPQPLKEQPALNDSRYCLSSRLRVSATFWQNPRNHFRCQVQFYGLSENDEWTQDRAKPVTQIVSAEAWGRADCGFTSESYQQGVLSATILYEILLGKATLYAVLVSALVLMAMVKRKDSRGRAKRSGSGATNFSLLKQAGDVEENPGPTSATMDWIWRILFLVGAATGAHSGPLWVSQPPEIRTLEGSSAFLPCSFNASQGRLAIGSVTWFRDEVVPGKEVRNGTPEFRGRLAPLASSRFLHDHQAELHIRDVRGHDASIYVCRVEVLGLGVGTGNGTRLVVEKEHPQLGTRIQNPDPAVYQLRDSKSSDKSVCLFTDFDSQTNVSQSKDSDVYITDKCVLDMRSMDFKSNSAVAWSNKSDFACANAFNNSIIPEDTFFPSPESSCDVKLVEKSFETDTNLNFQNLSVIGFRILLLKVAGFNLLMTLRLWSSRAKRSGSGVKQTLNFDLLKLAGDVESNPGPSRGHMTEYKPTVRLATRDDVPRAVRTLAAAFADYPATRHTVDPDRHIERVTELQELFLTRVGLDIGKVWVADDGAAVAVWTTPESVEAGAVFAEIGPRMAELSGSRLAAQQQMEGLLAPHRPKEPAWFLATVGVSPDHQGKGLGSAVVLPGVEAAERAGVPAFLETSAPRNLPFYERLGFTVTADVEVPEGPRTWCMTRKPGA

SEQ ID NO: 8348 - protein, 895 aa, Artificial Sequence; identical to SEQ ID NO: 4690
  Synthetic Polypeptide

SEQ ID NO: 8349 - protein, 957 aa, Artificial Sequence; identical to SEQ ID NO: 3995
  Synthetic Polypeptide

SEQ ID NO: 8350 - protein, 849 aa, Artificial Sequence; identical to SEQ ID NO: 4150
  Synthetic Polypeptide

SEQ ID NO: 8351 - protein, 1047 aa, Artificial Sequence; identical to SEQ ID NO: 4124
  Synthetic Polypeptide

SEQ ID NO: 8352 - protein, 736 aa, Artificial Sequence
  Synthetic Polypeptide
MALPVTALLLPLALLLHAARPDIQMTQTTSSLSASLGDRVTISCRASQDISKYLNWYQQKPDGTVKLLIYHTSRLHSGVPSRFSGSGSGTDYSLTISNLEQEDIATYFCQQGNTLPYTFGGGTKLEITGGGGSGGGGSGGGGSEVKLQESGPGLVAPSQSLSVTCTVSGVSLPDYGVSWIRQPPRKGLEWLGVIWGSETTYYNSALKSRLTIIKDNSKSQVFLKMNSLQTDDTAIYYCAKHYYYGGSYAMDYWGQGTSVTVSSTRGMRTEDLPKAVVFLEPQWYRVLEKDSVTLKCQGAYSPEDNSTQWFHNESLISSQASSYFIDAATVDDSGEYRCQTNLSTLSDPVQLEVHIGWLLLQAPRWVFKEEDPIHLRCHSWKNTALHKVTYLQNGKGRKYFHHNSDFYIPKATLKDSGSYFCRGLVGSKNVSSETVNITITQGLAVPTISSFFPPGYQVSFCLVMVLLFAVDTGLYFSVKTNIRSSTRDWKDHKFKWRKDPQDKRAKRSGSGVKQTLNFDLLKLAGDVESNPGPSRGHMTEYKPTVRLATRDDVPRAVRTLAAAFADYPATRHTVDPDRHIERVTELQELFLTRVGLDIGKVWVADDGAAVAVWTTPESVEAGAVFAEIGPRMAELSGSRLAAQQQMEGLLAPHRPKEPAWFLATVGVSPDHQGKGLGSAVVLPGVEAAERAGVPAFLETSAPRNLPFYERLGFTVTADVEVPEGPRTWCMTRKPGA

SEQ ID NO: 8353 - protein, 739 aa, Artificial Sequence
  Synthetic Polypeptide
MALPVTALLLPLALLLHAARPDEIVLTQSPATLSLSPGERATLSCRASQSVSSYLAWYQQKPGQAPRLLIYDASNRATGIPARFSGSGSGTDFTLTISSLEPEDFAVYYCQQRSNWPITFGQGTRLEIKGGGGSGGGGSGGGGSEVQLVESGGGLVQPGRSLRLSCAASGFTFNDYAMHWVRQAPGKGLEWVSTISWNSGSIGYADSVKGRFTISRDNAKKSLYLQMNSLRAEDTALYYCAKDIQYGNYYYGMDVWGQGTTVTVSSTRGMRTEDLPKAVVFLEPQWYRVLEKDSVTLKCQGAYSPEDNSTQWFHNESLISSQASSYFIDAATVDDSGEYRCQTNLSTLSDPVQLEVHIGWLLLQAPRWVFKEEDPIHLRCHSWKNTALHKVTYLQNGKGRKYFHHNSDFYIPKATLKDSGSYFCRGLVGSKNVSSETVNITITQGLAVPTISSFFPPGYQVSFCLVMVLLFAVDTGLYFSVKTNIRSSTRDWKDHKFKWRKDPQDKRAKRSGSGVKQTLNFDLLKLAGDVESNPGPSRGHMTEYKPTVRLATRDDVPRAVRTLAAAFADYPATRHTVDPDRHIERVTELQELFLTRVGLDIGKVWVADDGAAVAVWTTPESVEAGAVFAEIGPRMAELSGSRLAAQQQMEGLLAPHRPKEPAWFLATVGVSPDHQGKGLGSAVVLPGVEAAERAGVPAFLETSAPRNLPFYERLGFTVTADVEVPEGPRTWCMTRKPGA

SEQ ID NO: 8354 - protein, 740 aa, Artificial Sequence
  Synthetic Polypeptide
MALPVTALLLPLALLLHAARPQIVLSQSPAILSASPGEKVTMTCRASSSVSYMHWYQQKPGSSPKPWIYATSNLASGVPARFSGSGSGTSYSFTISRVEAEDAATYYCQQWTFNPPTFGGGTRLEIKRTVAAGGGGSGGGGSGGGGSQAYLQQSGAELVRPGASVKMSCKASGYTFTSYNMHWVKQTPRQGLEWIGGIYPGNGDTSYNQKFKGKATLTVGKSSSTAYMQLSSLTSEDSAVYFCARYDYNYAMDYWGQGTSVTVSSASTRGMRTEDLPKAVVFLEPQWYRVLEKDSVTLKCQGAYSPEDNSTQWFHNESLISSQASSYFIDAATVDDSGEYRCQTNLSTLSDPVQLEVHIGWLLLQAPRWVFKEEDPIHLRCHSWKNTALHKVTYLQNGKGRKYFHHNSDFYIPKATLKDSGSYFCRGLVGSKNVSSETVNITITQGLAVPTISSFFPPGYQVSFCLVMVLLFAVDTGLYFSVKTNIRSSTRDWKDHKFKWRKDPQDKRAKRSGSGVKQTLNFDLLKLAGDVESNPGPSRGHMTEYKPTVRLATRDDVPRAVRTLAAAFADYPATRHTVDPDRHIERVTELQELFLTRVGLDIGKVWVADDGAAVAVWTTPESVEAGAVFAEIGPRMAELSGSRLAAQQQMEGLLAPHRPKEPAWFLATVGVSPDHQGKGLGSAVVLPGVEAAERAGVPAFLETSAPRNLPFYERLGFTVTADVEVPEGPRTWCMTRKPGA

SEQ ID NO: 8355 - protein, 734 aa, Artificial Sequence
  Synthetic Polypeptide
MALPVTALLLPLALLLHAARPDVVMTQSPSSLSASVGDRVTITCMASEDIYIRLAWYQQKPGNAPKLLIYAATSLETGVPSRFSGSGSGTDFTLTISSLQPEDFATYYCQQYWSSPWTFGGGTKVEIKGGGGSGGGGSGGGGSQVQLQESGPGLVKPSQTLSLTCTVSGYSITSDYTWNWIRQPPGNGLEWIGYITYSGSTSYNPSLKSRVLISVDTSKNQVSLKLSSVTAADTAVYYCARLGRRYTMDYWGQGTTVTVSSTRGMRTEDLPKAVVFLEPQWYRVLEKDSVTLKCQGAYSPEDNSTQWFHNESLISSQASSYFIDAATVDDSGEYRCQTNLSTLSDPVQLEVHIGWLLLQAPRWVFKEEDPIHLRCHSWKNTALHKVTYLQNGKGRKYFHHNSDFYIPKATLKDSGSYFCRGLVGSKNVSSETVNITITQGLAVPTISSFFPPGYQVSFCLVMVLLFAVDTGLYFSVKTNIRSSTRDWKDHKFKWRKDPQDKRAKRSGSGVKQTLNFDLLKLAGDVESNPGPSRGHMTEYKPTVRLATRDDVPRAVRTLAAAFADYPATRHTVDPDRHIERVTELQELFLTRVGLDIGKVWVADDGAAVAVWTTPESVEAGAVFAEIGPRMAELSGSRLAAQQQMEGLLAPHRPKEPAWFLATVGVSPDHQGKGLGSAVVLPGVEAAERAGVPAFLETSAPRNLPFYERLGFTVTADVEVPEGPRTWCMTRKPGA

SEQ ID NO: 8356 - protein, 738 aa, Artificial Sequence
  Synthetic Polypeptide
MALPVTALLLPLALLLHAARPDIQMTQSPSSLSASVGDRVTITCSASQDISNYLNWYQQKPGKAPKLLIYYTSNLHSGVPSRFSGSGSGTDFTLTISSLQPEDFATYYCQQYRKLPWTFGQGTKLEIKRGGGGSGGGGSGGGGSQVQLVQSGAEVKKPGSSVKVSCKASGGTFSNYWMHWVRQAPGQGLEWMGATYRGHSDTYYNQKFKGRVTITADKSTSTAYMELSSLRSEDTAVYYCARGAIYDGYDVLDNWGQGTLVTVSSTRGMRTEDLPKAVVFLEPQWYRVLEKDSVTLKCQGAYSPEDNSTQWFHNESLISSQASSYFIDAATVDDSGEYRCQTNLSTLSDPVQLEVHIGWLLLQAPRWVFKEEDPIHLRCHSWKNTALHKVTYLQNGKGRKYFHHNSDFYIPKATLKDSGSYFCRGLVGSKNVSSETVNITITQGLAVPTISSFFPPGYQVSFCLVMVLLFAVDTGLYFSVKTNIRSSTRDWKDHKFKWRKDPQDKRAKRSGSGVKQTLNFDLLKLAGDVESNPGPSRGHMTEYKPTVRLATRDDVPRAVRTLAAAFADYPATRHTVDPDRHIERVTELQELFLTRVGLDIGKVWVADDGAAVAVWTTPESVEAGAVFAEIGPRMAELSGSRLAAQQQMEGLLAPHRPKEPAWFLATVGVSPDHQGKGLGSAVVLPGVEAAERAGVPAFLETSAPRNLPFYERLGFTVTADVEVPEGPRTWCMTRKPGA

SEQ ID NO: 8357 - protein, 739 aa, Artificial Sequence
  Synthetic Polypeptide
MALPVTALLLPLALLLHAARPDIQMTQTTSSLSASLGDRVTISCRASQDISNYLNWYQQKPDGTVKLLIYYTSILHSGVPSRFSGSGSGTDYSLTISNLEQEDFATYFCQQGNTLPWTFGGGTKLEIKAGGGGSGGGGSGGGGSEVQLVESGGGLVKPGGSLKLSCAASGFAFSIYDMSWVRQTPEKRLEWVAYISSGGGTYYPDTVKGRFTISRDNAKNTLYLQMSSLKSEDTAMYYCARHSGYGTHWGVLFAYWGQGTLVTVSATRGMRTEDLPKAVVFLEPQWYRVLEKDSVTLKCQGAYSPEDNSTQWFHNESLISSQASSYFIDAATVDDSGEYRCQTNLSTLSDPVQLEVHIGWLLLQAPRWVFKEEDPIHLRCHSWKNTALHKVTYLQNGKGRKYFHHNSDFYIPKATLKDSGSYFCRGLVGSKNVSSETVNITITQGLAVPTISSFFPPGYQVSFCLVMVLLFAVDTGLYFSVKTNIRSSTRDWKDHKFKWRKDPQDKRAKRSGSGVKQTLNFDLLKLAGDVESNPGPSRGHMTEYKPTVRLATRDDVPRAVRTLAAAFADYPATRHTVDPDRHIERVTELQELFLTRVGLDIGKVWVADDGAAVAVWTTPESVEAGAVFAEIGPRMAELSGSRLAAQQQMEGLLAPHRPKEPAWFLATVGVSPDHQGKGLGSAVVLPGVEAAERAGVPAFLETSAPRNLPFYERLGFTVTADVEVPEGPRTWCMTRKPGA

SEQ ID NO: 8358 - protein, 742 aa, Artificial Sequence
  Synthetic Polypeptide
MALPVTALLLPLALLLHAARPDIQMTQSPSSLSASVGDRVTITCRSSQSIVHSVGNTFLEWYQQKPGKAPKLLIYKVSNRFSGVPSRFSGSGSGTDFTLTISSLQPEDFATYYCFQGSQFPYTFGQGTKVEIKRGGGGSGGGGSGGGGSEVQLVESGGGLVQPGGSLRLSCAASGYEFSRSWMNWVRQAPGKGLEWVGRIYPGDGDTNYSGKFKGRFTISADTSKNTAYLQMNSLRAEDTAVYYCARDGSSWDWYFDVWGQGTLVTVSSTRGMRTEDLPKAVVFLEPQWYRVLEKDSVTLKCQGAYSPEDNSTQWFHNESLISSQASSYFIDAATVDDSGEYRCQTNLSTLSDPVQLEVHIGWLLLQAPRWVFKEEDPIHLRCHSWKNTALHKVTYLQNGKGRKYFHHNSDFYIPKATLKDSGSYFCRGLVGSKNVSSETVNITITQGLAVPTISSFFPPGYQVSFCLVMVLLFAVDTGLYFSVKTNIRSSTRDWKDHKFKWRKDPQDKRAKRSGSGVKQTLNFDLLKLAGDVESNPGPSRGHMTEYKPTVRLATRDDVPRAVRTLAAAFADYPATRHTVDPDRHIERVTELQELFLTRVGLDIGKVWVADDGAAVAVWTTPESVEAGAVFAEIGPRMAELSGSRLAAQQQMEGLLAPHRPKEPAWFLATVGVSPDHQGKGLGSAVVLPGVEAAERAGVPAFLETSAPRNLPFYERLGFTVTADVEVPEGPRTWCMTRKPGA

SEQ ID NO: 8359 - protein, 739 aa, Artificial Sequence
  Synthetic Polypeptide
MALPVTALLLPLALLLHAARPDIQMTQSPSSLSASVGDRVTITCRASQDISNYLNWYQQKPGKAPKLLIYYTSILHSGVPSRFSGSGSGTDYTLTISSLQPEDFATYYCQQGNTLPWTFGQGTKVEIKAGGGGSGGGGSGGGGSEVQLVESGGGLVQPGGSLRLSCAASGFAFSIYDMSWVRQAPGKGLEWVAYISSGGGTYYPDTVKGRFTISVDKSKNTAYLQMNSLRAEDTAVYYCARHSGYGTHWGVLFAYWGQGTLVTVSSTRGMRTEDLPKAVVFLEPQWYRVLEKDSVTLKCQGAYSPEDNSTQWFHNESLISSQASSYFIDAATVDDSGEYRCQTNLSTLSDPVQLEVHIGWLLLQAPRWVFKEEDPIHLRCHSWKNTALHKVTYLQNGKGRKYFHHNSDFYIPKATLKDSGSYFCRGLVGSKNVSSETVNITITQGLAVPTISSFFPPGYQVSFCLVMVLLFAVDTGLYFSVKTNIRSSTRDWKDHKFKWRKDPQDKRAKRSGSGVKQTLNFDLLKLAGDVESNPGPSRGHMTEYKPTVRLATRDDVPRAVRTLAAAFADYPATRHTVDPDRHIERVTELQELFLTRVGLDIGKVWVADDGAAVAVWTTPESVEAGAVFAEIGPRMAELSGSRLAAQQQMEGLLAPHRPKEPAWFLATVGVSPDHQGKGLGSAVVLPGVEAAERAGVPAFLETSAPRNLPFYERLGFTVTADVEVPEGPRTWCMTRKPGA

SEQ ID NO: 8360 - protein, 737 aa, Artificial Sequence
  Synthetic Polypeptide
MALPVTALLLPLALLLHAARPDEIVLTQSPATLSLSPGERATLSCSASSSVSYMHWYQQKPGQAPRLLIYDTSKLASGIPARFSGSGSGTDFTLTISSLEPEDVAVYYCFQGSVYPFTFGQGTKLEIKRGGGGSGGGGSGGGGSQVQLQESGPGLVKPSQTLSLTCTVSGGSISTSGMGVGWIRQHPGKGLEWIGHIWWDDDKRYNPALKSRVTISVDTSKNQFSLKLSSVTAADTAVYYCARMELWSYYFDYWGQGTLVTVSSTRGMRTEDLPKAVVFLEPQWYRVLEKDSVTLKCQGAYSPEDNSTQWFHNESLISSQASSYFIDAATVDDSGEYRCQTNLSTLSDPVQLEVHIGWLLLQAPRWVFKEEDPIHLRCHSWKNTALHKVTYLQNGKGRKYFHHNSDFYIPKATLKDSGSYFCRGLVGSKNVSSETVNITITQGLAVPTISSFFPPGYQVSFCLVMVLLFAVDTGLYFSVKTNIRSSTRDWKDHKFKWRKDPQDKRAKRSGSGVKQTLNFDLLKLAGDVESNPGPSRGHMTEYKPTVRLATRDDVPRAVRTLAAAFADYPATRHTVDPDRHIERVTELQELFLTRVGLDIGKVWVADDGAAVAVWTTPESVEAGAVFAEIGPRMAELSGSRLAAQQQMEGLLAPHRPKEPAWFLATVGVSPDHQGKGLGSAVVLPGVEAAERAGVPAFLETSAPRNLPFYERLGFTVTADVEVPEGPRTWCMTRKPGA

SEQ ID NO: 8361 - protein, 613 aa, Artificial Sequence
  Synthetic Polypeptide
MALPVTALLLPLALLLHAARPFEVQLVESGGGLVQAGGSLRLSCAASGRTFSMGWFRQAPGKEREFVAAITYSGGSPYYADSVKGRFTISRDNAKNTVYLQMNSLKPEDTAVYYCAANPTYGSDWNAENWGQGTQVTVSSTRGMRTEDLPKAVVFLEPQWYRVLEKDSVTLKCQGAYSPEDNSTQWFHNESLISSQASSYFIDAATVDDSGEYRCQTNLSTLSDPVQLEVHIGWLLLQAPRWVFKEEDPIHLRCHSWKNTALHKVTYLQNGKGRKYFHHNSDFYIPKATLKDSGSYFCRGLVGSKNVSSETVNITITQGLAVPTISSFFPPGYQVSFCLVMVLLFAVDTGLYFSVKTNIRSSTRDWKDHKFKWRKDPQDKRAKRSGSGVKQTLNFDLLKLAGDVESNPGPSRGHMTEYKPTVRLATRDDVPRAVRTLAAAFADYPATRHTVDPDRHIERVTELQELFLTRVGLDIGKVWVADDGAAVAVWTTPESVEAGAVFAEIGPRMAELSGSRLAAQQQMEGLLAPHRPKEPAWFLATVGVSPDHQGKGLGSAVVLPGVEAAERAGVPAFLETSAPRNLPFYERLGFTVTADVEVPEGPRTWCMTRKPGA

SEQ ID NO: 8362 - protein, 615 aa, Artificial Sequence
  Synthetic Polypeptide
MALPVTALLLPLALLLHAARPFEQVKLEESGGGLVQPGESLRLSCSASGSIFKVFRVFAMSWYRQGPGKQRELVASISSGETTTYAESVKGRFTISRDNAKNTAYLQMDSLKPEDTAVYYCNADHTFTGDFWGQGTQVTVSSTRGMRTEDLPKAVVFLEPQWYRVLEKDSVTLKCQGAYSPEDNSTQWFHNESLISSQASSYFIDAATVDDSGEYRCQTNLSTLSDPVQLEVHIGWLLLQAPRWVFKEEDPIHLRCHSWKNTALHKVTYLQNGKGRKYFHHNSDFYIPKATLKDSGSYFCRGLVGSKNVSSETVNITITQGLAVPTISSFFPPGYQVSFCLVMVLLFAVDTGLYFSVKTNIRSSTRDWKDHKFKWRKDPQDKRAKRSGSGVKQTLNFDLLKLAGDVESNPGPSRGHMTEYKPTVRLATRDDVPRAVRTLAAAFADYPATRHTVDPDRHIERVTELQELFLTRVGLDIGKVWVADDGAAVAVWTTPESVEAGAVFAEIGPRMAELSGSRLAAQQQMEGLLAPHRPKEPAWFLATVGVSPDHQGKGLGSAVVLPGVEAAERAGVPAFLETSAPRNLPFYERLGFTVTADVEVPEGPRTWCMTRKPGA

SEQ ID NO: 8363 - protein, 615 aa, Artificial Sequence
  Synthetic Polypeptide
MALPVTALLLPLALLLHAARPFEQVKLEESGGGLVQPGESLRLSCSASGSIFKVFRVFAMSWYRQGPGKQRELVAEISSGETTTYADSVKGRFTISRDNAKNTAYLQMDSLKPEDTAVYYCNADHTFTGDFWGQGTQVTVSSTRGMRTEDLPKAVVFLEPQWYRVLEKDSVTLKCQGAYSPEDNSTQWFHNESLISSQASSYFIDAATVDDSGEYRCQTNLSTLSDPVQLEVHIGWLLLQAPRWVFKEEDPIHLRCHSWKNTALHKVTYLQNGKGRKYFHHNSDFYIPKATLKDSGSYFCRGLVGSKNVSSETVNITITQGLAVPTISSFFPPGYQVSFCLVMVLLFAVDTGLYFSVKTNIRSSTRDWKDHKFKWRKDPQDKRAKRSGSGVKQTLNFDLLKLAGDVESNPGPSRGHMTEYKPTVRLATRDDVPRAVRTLAAAFADYPATRHTVDPDRHIERVTELQELFLTRVGLDIGKVWVADDGAAVAVWTTPESVEAGAVFAEIGPRMAELSGSRLAAQQQMEGLLAPHRPKEPAWFLATVGVSPDHQGKGLGSAVVLPGVEAAERAGVPAFLETSAPRNLPFYERLGFTVTADVEVPEGPRTWCMTRKPGA

SEQ ID NO: 8364 - protein, 613 aa, Artificial Sequence
  Synthetic Polypeptide
MALPVTALLLPLALLLHAARPFEVQLVESGGGLVQAGGSLRLSCAASGRTFTMGWFRQAPGKEREFVAAISLSPTLAYYADSVKGRFTISRDNAKNTVVLQMNSLKPEDTALYYCAADRKSVMSIRPDYWGQGTQVTVSSTRGMRTEDLPKAVVFLEPQWYRVLEKDSVTLKCQGAYSPEDNSTQWFHNESLISSQASSYFIDAATVDDSGEYRCQTNLSTLSDPVQLEVHIGWLLLQAPRWVFKEEDPIHLRCHSWKNTALHKVTYLQNGKGRKYFHHNSDFYIPKATLKDSGSYFCRGLVGSKNVSSETVNITITQGLAVPTISSFFPPGYQVSFCLVMVLLFAVDTGLYFSVKTNIRSSTRDWKDHKFKWRKDPQDKRAKRSGSGVKQTLNFDLLKLAGDVESNPGPSRGHMTEYKPTVRLATRDDVPRAVRTLAAAFADYPATRHTVDPDRHIERVTELQELFLTRVGLDIGKVWVADDGAAVAVWTTPESVEAGAVFAEIGPRMAELSGSRLAAQQQMEGLLAPHRPKEPAWFLATVGVSPDHQGKGLGSAVVLPGVEAAERAGVPAFLETSAPRNLPFYERLGFTVTADVEVPEGPRTWCMTRKPGA

SEQ ID NO: 8365 - protein, 739 aa, Artificial Sequence
  Synthetic Polypeptide
MALPVTALLLPLALLLHAARPDIQLTQSPDSLAVSLGERATINCKSSQSVLYSSINKNYLAWYQQKPGQPPKLLIYWASTRESGVPDRFSGSGSGTDFTLTISSLQAEDVAVYYCQQYYSTPYTFGQGTKVEIKGGGGSGGGGSGGGGSQMQLVQSGTEVKKPGESLKISCKGSGYGFITYWIGWVRQMPGKGLEWMGIIYPGDSETRYSPSFQGQVTISADKSINTAYLQWSSLKASDTAIYYCAGGSGISTPMDVWGQGTTVTVTRGMRTEDLPKAVVFLEPQWYRVLEKDSVTLKCQGAYSPEDNSTQWFHNESLISSQASSYFIDAATVDDSGEYRCQTNLSTLSDPVQLEVHIGWLLLQAPRWVFKEEDPIHLRCHSWKNTALHKVTYLQNGKGRKYFHHNSDFYIPKATLKDSGSYFCRGLVGSKNVSSETVNITITQGLAVPTISSFFPPGYQVSFCLVMVLLFAVDTGLYFSVKTNIRSSTRDWKDHKFKWRKDPQDKRAKRSGSGVKQTLNFDLLKLAGDVESNPGPSRGHMTEYKPTVRLATRDDVPRAVRTLAAAFADYPATRHTVDPDRHIERVTELQELFLTRVGLDIGKVWVADDGAAVAVWTTPESVEAGAVFAEIGPRMAELSGSRLAAQQQMEGLLAPHRPKEPAWFLATVGVSPDHQGKGLGSAVVLPGVEAAERAGVPAFLETSAPRNLPFYERLGFTVTADVEVPEGPRTWCMTRKPGA

SEQ ID NO: 8366 - protein, 961 aa, Artificial Sequence
  Synthetic Polypeptide
MALPVTALLLPLALLLHAARPDIQMTQSPSSLSASVGDRVTITCKASDHINNWLAWYQQKPGQAPKLLIYGATTLETGVPSRFSGSGSGTDYTLTISSLQPEDFATYYCQQSWNTPWTFGQGTKLEIKRLEGQPKANPTVTLFPPSSEELQANKATLVCLISDFYPGAVTVAWKADGSPVKAGVETTKPSKQSNNKYAASSYLSLTPEQWKSHRSYSCQVTHEGSTVEKTVAPTECSGSITQGLAVPTISSFFPPGYQVSFCLVMVLLFAVDTGLYFSVKTNIRSSTRDWKDHKFKWRKDPQDKRAKRSGSGVKQTLNFDLLKLAGDVESNPGPTSMDWIWRILFLVGAATGAHSFEQVQLQQPGAELVKPGASVKMSCKASGYAFSSYWINWMKQKPGQGLEWIGQIYPGDGDTNYNGKFKGRATLTADTSSSTAYMQLSSLTSEDSAVYFCARSITTVVGCAMDYWGQGTSVTVSSTRASTKGPSVFPLAPSSKSTSGGTAALGCLVKDYFPEPVTVSWNSGALTSGVHTFPAVLQSSGLYSLSSVVTVPSSSLGTQTYICNVNHKPSNTKVDKRVEPKSCGTQSFGLLDPKLCYLLDGILFIYGVILTALFLRVKFSRSADAPAYQQGQNQLYNELNLGRREEYDVLDKRRGRDPEMGGKPQRRKNPQEGLYNELQKDKMAEAYSEIGMKGERRRGKGHDGLYQGLSTATKDTYDALHMQALPPRRAKRSGSGVKQTLNFDLLKLAGDVESNPGPSRGHMTEYKPTVRLATRDDVPRAVRTLAAAFADYPATRHTVDPDRHIERVTELQELFLTRVGLDIGKVWVADDGAAVAVWTTPESVEAGAVFAEIGPRMAELSGSRLAAQQQMEGLLAPHRPKEPAWFLATVGVSPDHQGKGLGSAVVLPGVEAAERAGVPAFLETSAPRNLPFYERLGFTVTADVEVPEGPRTWCMTRKPGA

SEQ ID NO: 8367 - protein, 1280 aa, Artificial Sequence
  Synthetic Polypeptide
MALPVTALLLPLALLLHAARPLPVLTQPPSVSVAPGKTARITCGGNNIGSKSVHWYQQKPGQAPVLVVYDDSDRPSGIPERFSGSNSGNTATLTISRVEAGDEADYYCQVWDSSSDYVVFGGGTKLTVLGQPKANPTVTLFPPSSEELQANKATLVCLISDFYPGAVTVAWKADGSPVKAGVETTKPSKQSNNKYAASSYLSLTPEQWKSHRSYSCQVTHEGSTVEKTVAPTECSGSQSFGLLDPKLSYLLDGILFIYGVILTALFLWRRKRKEKQSETSPKEFLTIYEDVKDLKTRRNHEQEQTFPGGGSTIYSMIQSQSSAPTSQEPAYTLYSLIQPSRKSGSRKRNHSPSFNSTIYEVIGKSQPKAQNPARLSRKELENFDVYSTSRVKFSRSADAPAYQQGQNQLYNELNLGRREEYDVLDKRRGRDPEMGGKPQRRKNPQEGLYNELQKDKMAEAYSEIGMKGERRRGKGHDGLYQGLSTATKDTYDALHMQALPPRRAKRSGSGATNFSLLKQAGDVEENPGPMDWIWRILFLVGAATGAHSFEVQLVQSGAEVKKPGESLKISCKGSGYSFTSYWIGWVRQMPGKGLEWMGIIYPGDSDTRYSPSFQGQVTISADKSISTAYLQWSSLKASDTAMYYCARQVWGWQGGMYPRSNWWYNLDSWGQGTLVTVSSASTKGPSVFPLAPSSKSTSGGTAALGCLVKDYFPEPVTVSWNSGALTSGVHTFPAVLQSSGLYSLSSVVTVPSSSLGTQTYICNVNHKPSNTKVDKRVEPKSCGTQSFGLLDPKLSYLLDGILFIYGVILTALFLWRRKRKEKQSETSPKEFLTIYEDVKDLKTRRNHEQEQTFPGGGSTIYSMIQSQSSAPTSQEPAYTLYSLIQPSRKSGSRKRNHSPSFNSTIYEVIGKSQPKAQNPARLSRKELENFDVYSSRRVKFSRSADAPAYQQGQNQLYNELNLGRREEYDVLDKRRGRDPEMGGKPQRRKNPQEGLYNELQKDKMAEAYSEIGMKGERRRGKGHDGLYQGLSTATKDTYDALHMQALPPRRAKRSGSGVKQTLNFDLLKLAGDVESNPGPGHMTEYKPTVRLATRDDVPRAVRTLAAAFADYPATRHTVDPDRHIERVTELQELFLTRVGLDIGKVWVADDGAAVAVWTTPESVEAGAVFAEIGPRMAELSGSRLAAQQQMEGLLAPHRPKEPAWFLATVGVSPDHQGKGLGSAVVLPGVEAAERAGVPAFLETSAPRNLPFYERLGFTVTADVEVPEGPRTWCMTRKPGA

SEQ ID NO: 8368 - protein, 738 aa, Artificial Sequence
  Synthetic Polypeptide
MALPVTALLLPLALLLHAARPDIQMTQSPSSLSASVGDRVTITCKASDHINNWLAWYQQKPGQAPKLLIYGATTLETGVPSRFSGSGSGTDYTLTISSLQPEDFATYYCQQSWNTPWTFGQGTKLEIKRGGGGSGGGGSGGGGSQVQLQQPGAELVKPGASVKMSCKASGYAFSSYWINWMKQKPGQGLEWIGQIYPGDGDTNYNGKFKGRATLTADTSSSTAYMQLSSLTSEDSAVYFCARSITTVVGCAMDYWGQGTSVTVSSTRGMRTEDLPKAVVFLEPQWYRVLEKDSVTLKCQGAYSPEDNSTQWFHNESLISSQASSYFIDAATVDDSGEYRCQTNLSTLSDPVQLEVHIGWLLLQAPRWVFKEEDPIHLRCHSWKNTALHKVTYLQNGKGRKYFHHNSDFYIPKATLKDSGSYFCRGLVGSKNVSSETVNITITQGLAVPTISSFFPPGYQVSFCLVMVLLFAVDTGLYFSVKTNIRSSTRDWKDHKFKWRKDPQDKRAKRSGSGVKQTLNFDLLKLAGDVESNPGPSRGHMTEYKPTVRLATRDDVPRAVRTLAAAFADYPATRHTVDPDRHIERVTELQELFLTRVGLDIGKVWVADDGAAVAVWTTPESVEAGAVFAEIGPRMAELSGSRLAAQQQMEGLLAPHRPKEPAWFLATVGVSPDHQGKGLGSAVVLPGVEAAERAGVPAFLETSAPRNLPFYERLGFTVTADVEVPEGPRTWCMTRKPGA

SEQ ID NO: 8369 - protein, 629 aa, Artificial Sequence; identical to SEQ ID NO: 4712
  Synthetic Polypeptide

SEQ ID NO: 8370 - protein, 629 aa, Artificial Sequence; identical to SEQ ID NO: 8293
  Synthetic Polypeptide

SEQ ID NO: 8371 - protein, 505 aa, Artificial Sequence; identical to SEQ ID NO: 5254
  Synthetic Polypeptide

SEQ ID NO: 8372 - protein, 620 aa, Artificial Sequence
  Synthetic Polypeptide
MALPVTALLLPLALLLHAARPDIQMTQSPSSLSASVGDRVTITCKASDHINNWLAWYQQKPGQAPKLLIYGATTLETGVPSRFSGSGSGTDYTLTISSLQPEDFATYYCQQSWNTPWTFGQGTKLEIKRGGGGSGGGGSGGGGSQVQLQQPGAELVKPGASVKMSCKASGYAFSSYWINWMKQKPGQGLEWIGQIYPGDGDTNYNGKFKGRATLTADTSSSTAYMQLSSLTSEDSAVYFCARSITTVVGCAMDYWGQGTSVTVSSTRKIEVMYPPPYLDNEKSNGTIIHVKGARGDIENTSLAPEDPTFPADTWGTYLLTTETGLQKDHALWDHTAQNLLRMGLAFLVLVALVWFLVEDWLSRKRTRERASRASTWEGRRRLNTQTLRAKRSGSGVKQTLNFDLLKLAGDVESNPGPSRGHMTEYKPTVRLATRDDVPRAVRTLAAAFADYPATRHTVDPDRHIERVTELQELFLTRVGLDIGKVWVADDGAAVAVWTTPESVEAGAVFAEIGPRMAELSGSRLAAQQQMEGLLAPHRPKEPAWFLATVGVSPDHQGKGLGSAVVLPGVEAAERAGVPAFLETSAPRNLPFYERLGFTVTADVEVPEGPRTWCMTRKPGA

SEQ ID NO: 8373 - protein, 624 aa, Artificial Sequence
  Synthetic Polypeptide
MALPVTALLLPLALLLHAARPDIQMTQSPSSLSASVGDRVTITCKASDHINNWLAWYQQKPGQAPKLLIYGATTLETGVPSRFSGSGSGTDYTLTISSLQPEDFATYYCQQSWNTPWTFGQGTKLEIKRGGGGSGGGGSGGGGSQVQLQQPGAELVKPGASVKMSCKASGYAFSSYWINWMKQKPGQGLEWIGQIYPGDGDTNYNGKFKGRATLTADTSSSTAYMQLSSLTSEDSAVYFCARSITTVVGCAMDYWGQGTSVTVSSTRKIEVMYPPPYLDNEKSNGTIIHVKGARVAEGKTDNQYTLFVAGGTVLLLLFVISITTIIVIFLNRRRRRERRDLFTESWDTQKAPNNYRSPISTGQPTNQSMDDTREDIYVNYPTFSRRPKTRVRAKRSGSGVKQTLNFDLLKLAGDVESNPGPSRGHMTEYKPTVRLATRDDVPRAVRTLAAAFADYPATRHTVDPDRHIERVTELQELFLTRVGLDIGKVWVADDGAAVAVWTTPESVEAGAVFAEIGPRMAELSGSRLAAQQQMEGLLAPHRPKEPAWFLATVGVSPDHQGKGLGSAVVLPGVEAAERAGVPAFLETSAPRNLPFYERLGFTVTADVEVPEGPRTWCMTRKPGA

SEQ ID NO: 8374 - protein, 644 aa, Artificial Sequence
  Synthetic Polypeptide
MALPVTALLLPLALLLHAARPDIQMTQSPSSLSASVGDRVTITCKASDHINNWLAWYQQKPGQAPKLLIYGATTLETGVPSRFSGSGSGTDYTLTISSLQPEDFATYYCQQSWNTPWTFGQGTKLEIKRGGGGSGGGGSGGGGSQVQLQQPGAELVKPGASVKMSCKASGYAFSSYWINWMKQKPGQGLEWIGQIYPGDGDTNYNGKFKGRATLTADTSSSTAYMQLSSLTSEDSAVYFCARSITTVVGCAMDYWGQGTSVTVSSTRKIEVMYPPPYLDNEKSNGTIIHVKGARGDIENTSLAPEDPTFPADTWGTYLLTTETGLQKDHALWDHTAQNLLRMGLAFLVLVALVWFLVEDWLSRKRTRERASRASTWEGRRRLNTQTLRAKRSGSGVKQTLNFDLLKLAGDVESNPGPSRMYRMQLLSCIALSLALVTNSAPTSSSTKKTQLQLEHLLLDLQMILNGINNYKNPKLTEMLTAKFYMPKKATELKHLQCLEEELKPLEEVLNLAQSKNFHLRPRDLISNINVIVLELKGSETTFMCEYADETATIVEFLNRWITFCQSIISTLTKIEVMYPPPYLDNEKSNGTIIHVKGKHLCPSPLFPGPSKPFWVLVVVGGVLACYSLLVTVAFIIFWVRSKRS

SEQ ID NO: 8375 - protein, 592 aa, Artificial Sequence
  Synthetic Polypeptide
MALPVTALLLPLALLLHAARPDIQMTQSPSSLSASVGDRVTITCKASDHINNWLAWYQQKPGQAPKLLIYGATTLETGVPSRFSGSGSGTDYTLTISSLQPEDFATYYCQQSWNTPWTFGQGTKLEIKRGGGGSGGGGSGGGGSQVQLQQPGAELVKPGASVKMSCKASGYAFSSYWINWMKQKPGQGLEWIGQIYPGDGDTNYNGKFKGRATLTADTSSSTAYMQLSSLTSEDSAVYFCARSITTVVGCAMDYWGQGTSVTVSSTRKIEVMYPPPYLDNEKSNGTIIHVKGARITQGLAVSTISSFFPPGYQVSFCLVMVLLFAVDTGLYFSVKTNIRSSTRDWKDHKFKWRKDPQDKRAKRSGSGVKQTLNFDLLKLAGDVESNPGPSRGHMTEYKPTVRLATRDDVPRAVRTLAAAFADYPATRHTVDPDRHIERVTELQELFLTRVGLDIGKVWVADDGAAVAVWTTPESVEAGAVFAEIGPRMAELSGSRLAAQQQMEGLLAPHRPKEPAWFLATVGVSPDHQGKGLGSAVVLPGVEAAERAGVPAFLETSAPRNLPFYERLGFTVTADVEVPEGPRTWCMTRKPGA

SEQ ID NO: 8376 - protein, 712 aa, Artificial Sequence
  Synthetic Polypeptide
MALPVTALLLPLALLLHAARPDIQMTQSPSSLSASVGDRVTITCKASDHINNWLAWYQQKPGQAPKLLIYGATTLETGVPSRFSGSGSGTDYTLTISSLQPEDFATYYCQQSWNTPWTFGQGTKLEIKRGGGGSGGGGSGGGGSQVQLQQPGAELVKPGASVKMSCKASGYAFSSYWINWMKQKPGQGLEWIGQIYPGDGDTNYNGKFKGRATLTADTSSSTAYMQLSSLTSEDSAVYFCARSITTVVGCAMDYWGQGTSVTVSSTRKIEVMYPPPYLDNEKSNGTIIHVKGARDGNEEMGGITQTPYKVSISGTTVILTCPQYPGSEILWQHNDKNIGGDEDDKNIGSDEDHLSLKEFSELEQSGYYVCYPRGSKPEDANFYLYLRARVCENCMEMDVMSVATIVIVDICITGGLLLLVYYWSKNRKAKAKPVTRGAGAGGRQRGQNKERPPPVPNPDYEPIRKGQRDLYSGLNQRRIRAKRSGSGVKQTLNFDLLKLAGDVESNPGPSRDHMTEYKPTVRLATRDDVPRAVRTLAAAFADYPATRHTVDPDRHIERVTELQELFLTRVGLDIGKVWVADDGAAVAVWTTPESVEAGAVFAEIGPRMAELSGSRLAAQQQMEGLLAPHRPKEPAWFLATVGVSPDHQGKGLGSAVVLPGVEAAERAGVPAFLETSAPRNLPFYERLGFTVTADVEVPEGPRTWCMTRKPGA

SEQ ID NO: 8377 - protein, 707 aa, Artificial Sequence
  Synthetic Polypeptide
MALPVTALLLPLALLLHAARPDIQMTQSPSSLSASVGDRVTITCKASDHINNWLAWYQQKPGQAPKLLIYGATTLETGVPSRFSGSGSGTDYTLTISSLQPEDFATYYCQQSWNTPWTFGQGTKLEIKRGGGGSGGGGSGGGGSQVQLQQPGAELVKPGASVKMSCKASGYAFSSYWINWMKQKPGQGLEWIGQIYPGDGDTNYNGKFKGRATLTADTSSSTAYMQLSSLTSEDSAVYFCARSITTVVGCAMDYWGQGTSVTVSSTRKIEVMYPPPYLDNEKSNGTIIHVKGARKSVRFYLVVSPASASTQTSWTPRDLVSSQTQTQSCVPPTAGARQAPESPSTIPVPSQPQNSTLRPGPAAPIALVPVFCGLLVAKSLVLSALLVWWGDIWWKTMMELRSLDTQKATCHLQQVTDLPWTSVSSPVEREILYHTVARTKISDDDDEHTLRAKRSGSGVKQTLNFDLLKLAGDVESNPGPSRMYRMQLLSCIALSLALVTNSAPTSSSTKKTQLQLEHLLLDLQMILNGINNYKNPKLTEMLTAKFYMPKKATELKHLQCLEEELKPLEEVLNLAQSKNFHLRPRDLISNINVIVLELKGSETTFMCEYADETATIVEFLNRWITFCQSIISTLTKIEVMYPPPYLDNEKSNGTIIHVKGKHLCPSPLFPGPSKPFWVLVVVGGVLACYSLLVTVAFIIFWVRSKRS

SEQ ID NO: 8378 - protein, 609 aa, Artificial Sequence
  Synthetic Polypeptide
MGWIRGRRSRHSWEMSEFHNYNLDLKKSDFSTRWQKQRCPVVKSKCRENASPFFFCCFIAVAMGIRFIIMVAIWSAVFLNSLFNQEVQIPLTESYCGPCPKNWICYKNNCYQFFDESKNWYESQASCMSQNASLLKVYSKEDQDLLKLVKSYHWMGLVHIPTNGSWQWEDGSILSPNLLTIIEMQKGDCALYASSFKGYIENCSTPNTYICMQRTVGGGGSGGGGSGGGGSFEVQLVESGGGLVQAGGSLRLSCAASGRTFTMGWFRQAPGKEREFVAAISLSPTLAYYAESVKGRFTISRDNAKNTVVLQMNSLKPEDTALYYCAADRKSVMSIRPDYWGQGTQVTVSSTRRAKRSGSGVKQTLNFDLLKLAGDVESNPGPSRMYRMQLLSCIALSLALVTNSAPTSSSTKKTQLQLEHLLLDLQMILNGINNYKNPKLTEMLTAKFYMPKKATELKHLQCLEEELKPLEEVLNLAQSKNFHLRPRDLISNINVIVLELKGSETTFMCEYADETATIVEFLNRWITFCQSIISTLTKIEVMYPPPYLDNEKSNGTIIHVKGKHLCPSPLFPGPSKPFWVLVVVGGVLACYSLLVTVAFIIFWVRSKRS

SEQ ID NO: 8379 - protein, 617 aa, Artificial Sequence
  Synthetic Polypeptide
MGWIRGRRSRHSWEMSEFHNYNLDLKKSDFSTRWQKQRCPVVKSKCRENASPFFFCCFIAVAMGIRFIIMVAIWSAVFLNSLFNQEVQIPLTESYCGPCPKNWICYKNNCYQFFDESKNWYESQASCMSQNASLLKVYSKEDQDLLKLVKSYHWMGLVHIPTNGSWQWEDGSILSPNLLTIIEMQKGDCALYASSFKGYIENCSTPNTYICMQRTVGGGGSGGGGSGGGGSFEVQLVESGGGLVQAGGSLRLSCAASGRTFTMGWFRQAPGKEREFVAAISLSPTLAYYAESVKGRFTISRDNAKNTVVLQMNSLKPEDTALYYCAADRKSVMSIRPDYWGQGTQVTVSSTRRAKRSGSGVKQTLNFDLLKLAGDVESNPGPSRMYRMQLLSCIALSLALVTNSAPTSSSTKKTQLQLEHLLLDLQMILNGINNYKNPKLTRMLTFKFYMPKKATELKHLQCLEEELKPLEEVLNLAQSKNFHLRPRDLISNINVIVLELKGSETTFMCEYADETATIVEFLNRWITFCQSIISTLTHMLQMAGQCSQNEYFDSLLHACIPCQLRCSSNTPPLTCQRYCNASVTNSVKGTNAILWTCLGLSLIISLAVFVLMFLLRK

SEQ ID NO: 8380 - protein, 787 aa, Artificial Sequence; identical to SEQ ID NO: 8328
  Synthetic Polypeptide

SEQ ID NO: 8381 - protein, 680 aa, Artificial Sequence; identical to SEQ ID NO: 8329
  Synthetic Polypeptide

SEQ ID NO: 8382 - protein, 669 aa, Artificial Sequence; identical to SEQ ID NO: 8330
  Synthetic Polypeptide

SEQ ID NO: 8383 - protein, 644 aa, Artificial Sequence
  Synthetic Polypeptide
MALPVTALLLPLALLLHAARPDIQMTQSPSSLSASVGDRVTITCKASDHINNWLAWYQQKPGQAPKLLIYGATTLETGVPSRFSGSGSGTDYTLTISSLQPEDFATYYCQQSWNTPWTFGQGTKLEIKRGGGGSGGGGSGGGGSQVQLQQPGAELVKPGASVKMSCKASGYAFSSYWINWMKQKPGQGLEWIGQIYPGDGDTNYNGKFKGRATLTADTSSSTAYMQLSSLTSEDSAVYFCARSITTVVGCAMDYWGQGTSVTVSSTRTTTPAPRPPTPAPTIASQPLSLRPEACRPAAGGAVHTRGLDFACDARVAEGKTDNQYTLFVAGGTVLLLLFVISITTIIVIFLNRRRRRERRDLFTESWDTQKAPNNYRSPISTGQPTNQSMDDTREDIYVNYPTFSRRPKTRVRAKRSGSGVKQTLNFDLLKLAGDVESNPGPSRGHMTEYKPTVRLATRDDVPRAVRTLAAAFADYPATRHTVDPDRHIERVTELQELFLTRVGLDIGKVWVADDGAAVAVWTTPESVEAGAVFAEIGPRMAELSGSRLAAQQQMEGLLAPHRPKEPAWFLATVGVSPDHQGKGLGSAVVLPGVEAAERAGVPAFLETSAPRNLPFYERLGFTVTADVEVPEGPRTWCMTRKPGA

SEQ ID NO: 8384 - protein, 703 aa, Artificial Sequence
  Synthetic Polypeptide
MALPVTALLLPLALLLHAARPDIQMTQSPSSLSASVGDRVTITCKASDHINNWLAWYQQKPGQAPKLLIYGATTLETGVPSRFSGSGSGTDYTLTISSLQPEDFATYYCQQSWNTPWTFGQGTKLEIKRGGGGSGGGGSGGGGSQVQLQQPGAELVKPGASVKMSCKASGYAFSSYWINWMKQKPGQGLEWIGQIYPGDGDTNYNGKFKGRATLTADTSSSTAYMQLSSLTSEDSAVYFCARSITTVVGCAMDYWGQGTSVTVSSTRTTTPAPRPPTPAPTIASQPLSLRPEACRPAAGGAVHTRGLDFACDARKSVRFYLVVSPASASTQTSWTPRDLVSSQTQTQSCVPPTAGARQAPESPSTIPVPSQPQNSTLRPGPAAPIALVPVFCGLLVAKSLVLSALLVWWGDIWWKTMMELRSLDTQKATCHLQQVTDLPWTSVSSPVEREILYHTVARTKISDDDDEHTLRAKRSGSGVKQTLNFDLLKLAGDVESNPGPSRGHMTEYKPTVRLATRDDVPRAVRTLAAAFADYPATRHTVDPDRHIERVTELQELFLTRVGLDIGKVWVADDGAAVAVWTTPESVEAGAVFAEIGPRMAELSGSRLAAQQQMEGLLAPHRPKEPAWFLATVGVSPDHQGKGLGSAVVLPGVEAAERAGVPAFLETSAPRNLPFYERLGFTVTADVEVPEGPRTWCMTRKPGA

SEQ ID NO: 8385 - protein, 609 aa, Artificial Sequence
  Synthetic Polypeptide
MALPVTALLLPLALLLHAARPDIQMTQSPSSLSASVGDRVTITCKASDHINNWLAWYQQKPGQAPKLLIYGATTLETGVPSRFSGSGSGTDYTLTISSLQPEDFATYYCQQSWNTPWTFGQGTKLEIKRGGGGSGGGGSGGGGSQVQLQQPGAELVKPGASVKMSCKASGYAFSSYWINWMKQKPGQGLEWIGQIYPGDGDTNYNGKFKGRATLTADTSSSTAYMQLSSLTSEDSAVYFCARSITTVVGCAMDYWGQGTSVTVSSTRTTTPAPRPPTPAPTIASQPLSLRPEACRPAAGGAVHTRGLDFACDGTITQGLAVSTISSFFPPGYQVSFCLVMVLLFAVDTGLYFSVKTNIRSSTRDWKDHKFKWRKDPQDKRAKRSGSGATNFSLLKQAGDVEENPGPSRGHMTEYKPTVRLATRDDVPRAVRTLAAAFADYPATRHTVDPDRHIERVTELQELFLTRVGLDIGKVWVADDGAAVAVWTTPESVEAGAVFAEIGPRMAELSGSRLAAQQQMEGLLAPHRPKEPAWFLATVGVSPDHQGKGLGSAVVLPGVEAAERAGVPAFLETSAPRNLPFYERLGFTVTADVEVPEGPRTWCMTRKPGA

SEQ ID NO: 8386 - protein, 735 aa, Artificial Sequence
  Synthetic Polypeptide
MALPVTALLLPLALLLHAARPDIQMTQSPSSLSASVGDRVTITCKASDHINNWLAWYQQKPGQAPKLLIYGATTLETGVPSRFSGSGSGTDYTLTISSLQPEDFATYYCQQSWNTPWTFGQGTKLEIKRGGGGSGGGGSGGGGSQVQLQQPGAELVKPGASVKMSCKASGYAFSSYWINWMKQKPGQGLEWIGQIYPGDGDTNYNGKFKGRATLTADTSSSTAYMQLSSLTSEDSAVYFCARSITTVVGCAMDYWGQGTSVTVSSTRTTTPAPRPPTPAPTIASQPLSLRPEACRPAAGGAVHTRGLDFACDGTTTPGERSSLPAFYPGTSGSCSGCGSLSLPLLAGLVAADAVASLLIVGAVFLCARPRRSPAQEDGKVYINMPGRGSSRRVKFSRSADAPAYQQGQNQLYNELNLGRREEYDVLDKRRGRDPEMGGKPQRRKNPQEGLYNELQKDKMAEAYSEIGMKGERRRGKGHDGLYQGLSTATKDTYDALHMQALPPRRAKRSGSGVKQTLNFDLLKLAGDVESNPGPGHMTEYKPTVRLATRDDVPRAVRTLAAAFADYPATRHTVDPDRHIERVTELQELFLTRVGLDIGKVWVADDGAAVAVWTTPESVEAGAVFAEIGPRMAELSGSRLAAQQQMEGLLAPHRPKEPAWFLATVGVSPDHQGKGLGSAVVLPGVEAAERAGVPAFLETSAPRNLPFYERLGFTVTADVEVPEGPRTWCMTRKPGA

SEQ ID NO: 8387 - protein, 640 aa, Artificial Sequence
  Synthetic Polypeptide
MALPVTALLLPLALLLHAARPDIQMTQSPSSLSASVGDRVTITCKASDHINNWLAWYQQKPGQAPKLLIYGATTLETGVPSRFSGSGSGTDYTLTISSLQPEDFATYYCQQSWNTPWTFGQGTKLEIKRGGGGSGGGGSGGGGSQVQLQQPGAELVKPGASVKMSCKASGYAFSSYWINWMKQKPGQGLEWIGQIYPGDGDTNYNGKFKGRATLTADTSSSTAYMQLSSLTSEDSAVYFCARSITTVVGCAMDYWGQGTSVTVSSTRTTTPAPRPPTPAPTIASQPLSLRPEACRPAAGGAVHTRGLDFACDARGDIENTSLAPEDPTFPADTWGTYLLTTETGLQKDHALWDHTAQNLLRMGLAFLVLVALVWFLVEDWLSRKRTRERASRASTWEGRRRLNTQTLRAKRSGSGVKQTLNFDLLKLAGDVESNPGPSRGHMTEYKPTVRLATRDDVPRAVRTLAAAFADYPATRHTVDPDRHIERVTELQELFLTRVGLDIGKVWVADDGAAVAVWTTPESVEAGAVFAEIGPRMAELSGSRLAAQQQMEGLLAPHRPKEPAWFLATVGVSPDHQGKGLGSAVVLPGVEAAERAGVPAFLETSAPRNLPFYERLGFTVTADVEVPEGPRTWCMTRKPGA

SEQ ID NO: 8388 - protein, 586 aa, Artificial Sequence
  Synthetic Polypeptide
MGWIRGRRSRHSWEMSEFHNYNLDLKKSDFSTRWQKQRCPVVKSKCRENASPFFFCCFIAVAMGIRFIIMVAIWSAVFLNSLFNQEVQIPLTESYCGPCPKNWICYKNNCYQFFDESKNWYESQASCMSQNASLLKVYSKEDQDLLKLVKSYHWMGLVHIPTNGSWQWEDGSILSPNLLTIIEMQKGDCALYASSFKGYIENCSTPNTYICMQRTVGGGGSGGGGSGGGGSFEVQLVESGGGLVQPGGSLRLSCAASGSIFGFNDMAWYRQAPGKQRELVALISRVGVTSSADSVKGRFTISRVNAKDTVYLQMNSLKPEDTAVYYCYMDQRLDGSTLAYWGQGTQVTVSSTRRAKRSGSGVKQTLNFDLLKLAGDVESNPGPSRGHMTEYKPTVRLATRDDVPRAVRTLAAAFADYPATRHTVDPDRHIERVTELQELFLTRVGLDIGKVWVADDGAAVAVWTTPESVEAGAVFAEIGPRMAELSGSRLAAQQQMEGLLAPHRPKEPAWFLATVGVSPDHQGKGLGSAVVLPGVEAAERAGVPAFLETSAPRNLPFYERLGFTVTADVEVPEGPRTWCMTRKPGA

SEQ ID NO: 8389 - protein, 592 aa, Artificial Sequence
  Synthetic Polypeptide
MGWIRGRRSRHSWEMSEFHNYNLDLKKSDFSTRWQKQRCPVVKSKCRENASPFFFCCFIAVAMGIRFIIMVAIWSAVFLNSLFNQEVQIPLTESYCGPCPKNWICYKNNCYQFFDESKNWYESQASCMSQNASLLKVYSKEDQDLLKLVKSYHWMGLVHIPTNGSWQWEDGSILSPNLLTIIEMQKGDCALYASSFKGYIENCSTPNTYICMQRTVGGGGSGGGGSGGGGSFEVQLVESGGGLVQPGGSLRLSCAASGRTYYLNAMGWFRQAPGKEREFVAAIDWSEGNKDYADSVKGRFTISRDNSKNTVYLQMNSLRPEDTAVYYCAADTPPWGPLIYIESYDSWGQGTLVTVSSTRRAKRSGSGVKQTLNFDLLKLAGDVESNPGPSRGHMTEYKPTVRLATRDDVPRAVRTLAAAFADYPATRHTVDPDRHIERVTELQELFLTRVGLDIGKVWVADDGAAVAVWTTPESVEAGAVFAEIGPRMAELSGSRLAAQQQMEGLLAPHRPKEPAWFLATVGVSPDHQGKGLGSAVVLPGVEAAERAGVPAFLETSAPRNLPFYERLGFTVTADVEVPEGPRTWCMTRKPGA

SEQ ID NO: 8390 - protein, 585 aa, Artificial Sequence
  Synthetic Polypeptide
MGWIRGRRSRHSWEMSEFHNYNLDLKKSDFSTRWQKQRCPVVKSKCRENASPFFFCCFIAVAMGIRFIIMVAIWSAVFLNSLFNQEVQIPLTESYCGPCPKNWICYKNNCYQFFDESKNWYESQASCMSQNASLLKVYSKEDQDLLKLVKSYHWMGLVHIPTNGSWQWEDGSILSPNLLTIIEMQKGDCALYASSFKGYIENCSTPNTYICMQRTVGGGGSGGGGSGGGGSFEVQLVESGGGLVQAGGSLRLSCAASGRTFTMGWFRQAPGKEREFVAAISLSPTLAYYAESVKGRFTISRDNAKNTVVLQMNSLKPEDTALYYCAADRKSVMSIRPDYWGQGTQVTVSSTRRAKRSGSGVKQTLNFDLLKLAGDVESNPGPSRGHMTEYKPTVRLATRDDVPRAVRTLAAAFADYPATRHTVDPDRHIERVTELQELFLTRVGLDIGKVWVADDGAAVAVWTTPESVEAGAVFAEIGPRMAELSGSRLAAQQQMEGLLAPHRPKEPAWFLATVGVSPDHQGKGLGSAVVLPGVEAAERAGVPAFLETSAPRNLPFYERLGFTVTADVEVPEGPRTWCMTRKPGA

SEQ ID NO: 8391 - protein, 607 aa, Artificial Sequence
  Synthetic Polypeptide
MQDEERYMTLNVQSKKRSSAQTSQLTFKDYSVTLHWYKILLGISGTVNGILTLTLISLILLVSQGVLLKCQKGSCSNATQYEDTGDLKVNNGTRRNISNKDLCASRSADQTVLCQSEWLKYQGKCYWFSNEMKSWSDSYVYCLERKSHLLIIHDQLEMAFIQKNLRQLNYVWIGLNFTSLKMTWTWVDGSPIDSKIFFIKGPAKENSCAAIKESKIFSETCSSVFKWICQYGGGGSGGGGSGGGGSFEVQLVESGGGLVQPGGSLRLSCAASGRTYYLNAMGWFRQAPGKEREFVAAIDWSEGNKDYADSVKGRFTISRDNSKNTVYLQMNSLRPEDTAVYYCAADTPPWGPLIYIESYDSWGQGTLVTVSSTRRAKRSGSGVKQTLNFDLLKLAGDVESNPGPSRGHMTEYKPTVRLATRDDVPRAVRTLAAAFADYPATRHTVDPDRHIERVTELQELFLTRVGLDIGKVWVADDGAAVAVWTTPESVEAGAVFAEIGPRMAELSGSRLAAQQQMEGLLAPHRPKEPAWFLATVGVSPDHQGKGLGSAVVLPGVEAAERAGVPAFLETSAPRNLPFYERLGFTVTADVEVPEGPRTWCMTRKPGA

SEQ ID NO: 8392 - protein, 781 aa, Artificial Sequence
  Synthetic Polypeptide
MALPVTALLLPLALLLHAARPDIQMTQSPSSLSASVGDRVTITCKASDHINNWLAWYQQKPGQAPKLLIYGATTLETGVPSRFSGSGSGTDYTLTISSLQPEDFATYYCQQSWNTPWTFGQGTKLEIKRGGGGSGGGGSGGGGSQVQLQQPGAELVKPGASVKMSCKASGYAFSSYWINWMKQKPGQGLEWIGQIYPGDGDTNYNGKFKGRATLTADTSSSTAYMQLSSLTSEDSAVYFCARSITTVVGCAMDYWGQGTSVTVSSTRQSKAQVLQSVAGQTLTVRCQYPPTGSLYEKKGWCKEASALVCIRLVTSSKPRTMAWTSRFTIWDDPDAGFFTVTMTDLREEDSGHYWCRIYRPSDNSVSKSVRFYLVVSPASASTQTSWTPRDLVSSQTQTQSCVPPTAGARQAPESPSTIPVPSQPQNSTLRPGPAAPIALVPVFCGLLVAKSLVLSALLVWWGDIWWKTMMELRSLDTQKATCHLQQVTDLPWTSVSSPVEREILYHTVARTKISDDDDEHTLRAKRSGSGVKQTLNFDLLKLAGDVESNPGPSRMYRMQLLSCIALSLALVTNSAPTSSSTKKTQLQLEHLLLDLQMILNGINNYKNPKLTRMLTFKFYMPKKATELKHLQCLEEELKPLEEVLNLAQSKNFHLRPRDLISNINVIVLELKGSETTFMCEYADETATIVEFLNRWITFCQSIISTLTARKIEVMYPPPYLDNEKSNGTIIHVKGKHLCPSPLFPGPSKPFWVLVVVGGVLACYSLLVTVAFIIFWVRSKRS

SEQ ID NO: 8393 - protein, 1066 aa, Artificial Sequence
  Synthetic Polypeptide
MALPVTALLLPLALLLHAARPLPVLTQPPSVSVAPGKTARITCGGNNIGSKSVHWYQQKPGQAPVLVVYDDSDRPSGIPERFSGSNSGNTATLTISRVEAGDEADYYCQVWDSSSDYVVFGGGTKLTVLGQPKANPTVTLFPPSSEELQANKATLVCLISDFYPGAVTVAWKADGSPVKAGVETTKPSKQSNNKYAASSYLSLTPEQWKSHRSYSCQVTHEGSTVEKTVAPTECSGSQSFGLLDPKLCYLLDGILFIYGVILTALFLRVKFSRSADAPAYQQGQNQLYNELNLGRREEYDVLDKRRGRDPEMGGKPQRRKNPQEGLYNELQKDKMAEAYSEIGMKGERRRGKGHDGLYQGLSTATKDTYDALHMQALPPRRAKRSGSGATNFSLLKQAGDVEENPGPTSMDWIWRILFLVGAATGAHSFEVQLVQSGAEVKKPGESLKISCKGSGYSFTSYWIGWVRQMPGKGLEWMGIIYPGDSDTRYSPSFQGQVTISADKSISTAYLQWSSLKASDTAMYYCARQVWGWQGGMYPRSNWWYNLDSWGQGTLVTVSSASTKGPSVFPLAPSSKSTSGGTAALGCLVKDYFPEPVTVSWNSGALTSGVHTFPAVLQSSGLYSLSSVVTVPSSSLGTQTYICNVNHKPSNTKVDKRVEPKSCGTQSFGLLDPKLCYLLDGILFIYGVILTALFLRVKFSRSADAPAYQQGQNQLYNELNLGRREEYDVLDKRRGRDPEMGGKPQRRKNPQEGLYNELQKDKMAEAYSEIGMKGERRRGKGHDGLYQGLSTATKDTYDALHMQALPPRRAKRSGSGVKQTLNFDLLKLAGDVESNPGPSRMYRMQLLSCIALSLALVTNSAPTSSSTKKTQLQLEHLLLDLQMILNGINNYKNPKLTRMLTFKFYMPKKATELKHLQCLEEELKPLEEVLNLAQSKNFHLRPRDLISNINVIVLELKGSETTFMCEYADETATIVEFLNRWITFCQSIISTLTARKIEVMYPPPYLDNEKSNGTIIHVKGKHLCPSPLFPGPSKPFWVLVVVGGVLACYSLLVTVAFIIFWVRSKRS

SEQ ID NO: 8394 - protein, 787 aa, Artificial Sequence; identical to SEQ ID NO: 8328
  Synthetic Polypeptide

SEQ ID NO: 8395 - protein, 402 aa, Artificial Sequence
  Synthetic Polypeptide
MALPVTALLLPLALLLHAARPDIQMNQSPSSLSASLGDTITITCHASQNINVWLSWYQQKPGNIPKLLIYKASNLHTGVPSRFSGSGSGTGFTITISSLQPEDIATYYCQQGQSYPWTFGGGTKLEIKRGGGGSGGGGSGGGGSEVQLQQSGPELVKPGASVKISCKASGYSFTGYFMNWVKQSHGKSLEYIGRFNPYNGETLYNQKFKGKATLTVDKSSSTVHMELLSVTSEDSAVYYCGRSGNDDAMDYWGQGTSVTVSSATRGGSGAPTSSSTKKTQLQLEHLLLDLQMILNGINNYKNPKLTAMLTKKFYMPKKATELKHLQCLEEELKPLEEVLNLAQSKNFHLRPRDLISNINVIVLELKGSETTFMCEYADETATIVEFLNRWITFCASIISTLT

SEQ ID NO: 8396 - protein, 402 aa, Artificial Sequence
  Synthetic Polypeptide
MALPVTALLLPLALLLHAARPDIQMNQSPSSLSASLGDTITITCHASQNINVWLSWYQQKPGNIPKLLIYKASNLHTGVPSRFSGSGSGTGFTITISSLQPEDIATYYCQQGQSYPWTFGGGTKLEIKRGGGGSGGGGSGGGGSEVQLQQSGPELVKPGASVKISCKASGYSFTGYFMNWVKQSHGKSLEYIGRFNPYNGETLYNQKFKGKATLTVDKSSSTVHMELLSVTSEDSAVYYCGRSGNDDAMDYWGQGTSVTVSSATRGGSGAPTSSSTKKTQLQLEHLLLDLQMILNGINNYKNPKLTEMLTAKFYMPKKATELKHLQCLEEELKPLEEVLNLAQSKNFHLRPRDLISNINVAVLELKGSETTFMCEYADETATIVEFLNRWITFCQSIISTLT

SEQ ID NO: 8397 - protein, 402 aa, Artificial Sequence
  Synthetic Polypeptide
MALPVTALLLPLALLLHAARPDIQMNQSPSSLSASLGDTITITCHASQNINVWLSWYQQKPGNIPKLLIYKASNLHTGVPSRFSGSGSGTGFTITISSLQPEDIATYYCQQGQSYPWTFGGGTKLEIKRGGGGSGGGGSGGGGSEVQLQQSGPELVKPGASVKISCKASGYSFTGYFMNWVKQSHGKSLEYIGRFNPYNGETLYNQKFKGKATLTVDKSSSTVHMELLSVTSEDSAVYYCGRSGNDDAMDYWGQGTSVTVSSATRGGSGAPTSSSTKKTQLQLEHLLLDLQMILNGINNYKNPKLTRMLTAKFAMPKKATELKHLQCLEEELKPLEEVLNGAQSKNFHLRPRDLISNINVIVLELKGSETTFMCEYADETATIVEFLNRWITFGQSIISTLT

SEQ ID NO: 8398 - protein, 402 aa, Artificial Sequence
  Synthetic Polypeptide
MALPVTALLLPLALLLHAARPDIQMNQSPSSLSASLGDTITITCHASQNINVWLSWYQQKPGNIPKLLIYKASNLHTGVPSRFSGSGSGTGFTITISSLQPEDIATYYCQQGQSYPWTFGGGTKLEIKRGGGGSGGGGSGGGGSEVQLQQSGPELVKPGASVKISCKASGYSFTGYFMNWVKQSHGKSLEYIGRFNPYNGETLYNQKFKGKATLTVDKSSSTVHMELLSVTSEDSAVYYCGRSGNDDAMDYWGQGTSVTVSSATRGGSGAPTSSSTKKTQLQLEHLLLDLQMILNGINNYKNPKLTRMLTFKFYMPKKATELKHLQCLEEELKPLEEVLNLAQSKNFHLRPRDLISNINVIVLELKGSETTFMCEYADETATIVEFLNRWITFCQSIISTLT

SEQ ID NO: 8399 - protein, 1066 aa, Artificial Sequence; identical to SEQ ID NO: 8393
  Synthetic Polypeptide

SEQ ID NO: 8400 - protein, 1378 aa, Artificial Sequence
  Synthetic Polypeptide
MALPVTALLLPLALLLHAARPACEVQLVESGGGLVQPGGSLRLSCAASGYTFTTYWMHWVRQAPGKGLEWVGYIRPSTGYTEYNQKFKDRFTISADTSKNTAYLQMNSLRAEDTAVYYCARSRWLLDYWGQGTLVTVSGGGGSGGGGSGGGGSDIQMTQSPSSLSASVGDRVTITCKSSQSVLYSSNQKNYLAWFQQKPGKAPKLLIYWASTRESGVPSRFSGSGSGTDFTLTISSLQPEDFATYFCHQYLSSYTFGQGTKVEIKRGTGGGGSGGGGSGGGGSEFDIQMTQSPSSLSASVGDRVTITCKASDHINNWLAWYQQKPGQAPKLLIYGATTLETGVPSRFSGSGSGTDYTLTISSLQPEDFATYYCQQSWNTPWTFGQGTKLEIKRLEDLKNVFPPEVAVFEPSKAEIAHTQKATLVCLATGFYPDHVELSWWVNGKEVHSGVCTDPQPLKEQPALNDSRYCLSSRLRVSATFWQNPRNHFRCQVQFYGLSENDEWTQDRAKPVTQIVSAEAWGRADCGITSASYHQGVLSATILYEILLGKATLYAVLVSALVLMAMVKRKDSRGRAKRSGSGATNFSLLKQAGDVEENPGPTSATMDWIWRILFLVGAATGAHSGPDIQMTQSPSSLSASVGDRVTITCKASQDVGTAVDWYQQKPGKAPKLLIYWASTRHTGVPSRFSGSGSGTDFTLTISSLQPEDFATYYCQQYNSYPLTFGQGTKVEIKRGGGGSGGGGSGGGGSEVQLVESGGGLVQPGGSLRLSCAASGYTFTEYTIHWVRQAPGKGLEWVANINPNNGGTTYNQKFEDRFTISRDNSKNTLYLQMNSLRAEDTAVYYCARGWNFDYWGQGTLVTVSSGSGGGGSGGGGSGGGGSFEQVQLQQPGAELVKPGASVKMSCKASGYAFSSYWINWMKQKPGQGLEWIGQIYPGDGDTNYNGKFKGRATLTADTSSSTAYMQLSSLTSEDSAVYFCARSITTVVGCAMDYWGQGTSVTVSSTRIQNPDPAVYQLRDSKSSDKSVCLFTDFDSQTNVSQSKDSDVYITDKCVLDMRSMDFKSNSAVAWSNKSDFACANAFNNSIIPEDTFFPSSDVPCDVKLVEKSFETDTNLNFQNLSVIGFRILLLKVAGFNLLMTLRLWSSRAKRSGSGVKQTLNFDLLKLAGDVESNPGPSRGHMTEYKPTVRLATRDDVPRAVRTLAAAFADYPATRHTVDPDRHIERVTELQELFLTRVGLDIGKVWVADDGAAVAVWTTPESVEAGAVFAEIGPRMAELSGSRLAAQQQMEGLLAPHRPKEPAWFLATVGVSPDHQGKGLGSAVVLPGVEAAERAGVPAFLETSAPRNLPFYERLGFTVTADVEVPEGPRTWCMTRKPGA

SEQ ID NO: 8401 - protein, 877 aa, Artificial Sequence
  Synthetic Polypeptide
MALPVTALLLPLALLLHAARPDIQMTQSPSSLSASVGDRVTITCKASDHINNWLAWYQQKPGQAPKLLIYGATTLETGVPSRFSGSGSGTDYTLTISSLQPEDFATYYCQQSWNTPWTFGQGTKLEIKRLEDKQLDADVSPKPTIFLPSIAETKLQKAGTYLCLLEKFFPDIIKIHWQEKKSNTILGSQEGNTMKTNDTYMKFSWLTVPEESLDKEHRCIVRHENNKNGIDQEIIFPPIKTDVTTVDPKYNYSKDANDVITMDPKDNWSKDANDTLLLQLTNTSAYYTYLLLLLKSVVYFAIITCCLLRRTAFCCNGEKSRAKRSGSGATNFSLLKQAGDVEENPGPTSMDWIWRILFLVGAATGAHSFEQVQLQQPGAELVKPGASVKMSCKASGYAFSSYWINWMKQKPGQGLEWIGQIYPGDGDTNYNGKFKGRATLTADTSSSTAYMQLSSLTSEDSAVYFCARSITTVVGCAMDYWGQGTSVTVSSTRPHTKPSVFVMKNGTNVACLVKEFYPKDIRINLVSSKKITEFDPAIVISPSGKYNAVKLGKYEDSNSVTCSVQHDNKTVHSTDFEVKTDSTDHVKPKETENTKQPSKSCHKPKAIVHTEKVNMMSLTVLGLRMLFAKTVAVNFLLTAKLFFLRAKRSGSGVKQTLNFDLLKLAGDVESNPGPSRGHMTEYKPTVRLATRDDVPRAVRTLAAAFADYPATRHTVDPDRHIERVTELQELFLTRVGLDIGKVWVADDGAAVAVWTTPESVEAGAVFAEIGPRMAELSGSRLAAQQQMEGLLAPHRPKEPAWFLATVGVSPDHQGKGLGSAVVLPGVEAAERAGVPAFLETSAPRNLPFYERLGFTVTADVEVPEGPRTWCMTRKPGA

SEQ ID NO: 8402 - protein, 707 aa, Artificial Sequence
  Synthetic Polypeptide
MALPVTALLLPLALLLHAARPDIQMTQSPSSLSASVGDRVTITCKASDHINNWLAWYQQKPGQAPKLLIYGATTLETGVPSRFSGSGSGTDYTLTISSLQPEDFATYYCQQSWNTPWTFGQGTKLEIKRGGGGSGGGGSGGGGSQVQLQQPGAELVKPGASVKMSCKASGYAFSSYWINWMKQKPGQGLEWIGQIYPGDGDTNYNGKFKGRATLTADTSSSTAYMQLSSLTSEDSAVYFCARSITTVVGCAMDYWGQGTSVTVSSTRLWVSQPPEIRTLEGSSAFLPCSFNASQGRLAIGSVTWFRDEVVPGKEVRNGTPEFRGRLAPLASSRFLHDHQAELHIRDVRGHDASIYVCRVEVLGLGVGTGNGTRLVVEKEHPQLGAGTVLLLRAGFYAVSFLSVAVGSTVYYQGKCLTWKGPRRQLPAVVPAPLPPPCGSSAHLLPPVPGGRAKRSGSGVKQTLNFDLLKLAGDVESNPGPSRMYRMQLLSCIALSLALVTNSAPTSSSTKKTQLQLEHLLLDLQMILNGINNYKNPKLTEMLTAKFYMPKKATELKHLQCLEEELKPLEEVLNLAQSKNFHLRPRDLISNINVIVLELKGSETTFMCEYADETATIVEFLNRWITFCQSIISTLTKIEVMYPPPYLDNEKSNGTIIHVKGKHLCPSPLFPGPSKPFWVLVVVGGVLACYSLLVTVAFIIFWVRSKRS

SEQ ID NO: 8403 - protein, 707 aa, Artificial Sequence
  Synthetic Polypeptide
MALPVTALLLPLALLLHAARPDIQMTQSPSSLSASVGDRVTITCKASDHINNWLAWYQQKPGQAPKLLIYGATTLETGVPSRFSGSGSGTDYTLTISSLQPEDFATYYCQQSWNTPWTFGQGTKLEIKRGGGGSGGGGSGGGGSQVQLQQPGAELVKPGASVKMSCKASGYAFSSYWINWMKQKPGQGLEWIGQIYPGDGDTNYNGKFKGRATLTADTSSSTAYMQLSSLTSEDSAVYFCARSITTVVGCAMDYWGQGTSVTVSSTRLWVSQPPEIRTLEGSSAFLPCSFNASQGRLAIGSVTWFRDEVVPGKEVRNGTPEFRGRLAPLASSRFLHDHQAELHIRDVRGHDASIYVCRVEVLGLGVGTGNGTRLVVEKEHPQLGAGTVLLLRAGFYAVSFLSVAVGSTVYYQGKCLTWKGPRRQLPAVVPAPLPPPCGSSAHLLPPVPGGRAKRSGSGVKQTLNFDLLKLAGDVESNPGPSRMYRMQLLSCIALSLALVTNSAPTSSSTKKTQLQLEHLLLDLQMILNGINNYKNPKLTAMLTKKFYMPKKATELKHLQCLEEELKPLEEVLNLAQSKNFHLRPRDLISNINVIVLELKGSETTFMCEYADETATIVEFLNRWITFCASIISTLTKIEVMYPPPYLDNEKSNGTIIHVKGKHLCPSPLFPGPSKPFWVLVVVGGVLACYSLLVTVAFIIFWVRSKRS

SEQ ID NO: 8404 - protein, 707 aa, Artificial Sequence
  Synthetic Polypeptide
MALPVTALLLPLALLLHAARPDIQMTQSPSSLSASVGDRVTITCKASDHINNWLAWYQQKPGQAPKLLIYGATTLETGVPSRFSGSGSGTDYTLTISSLQPEDFATYYCQQSWNTPWTFGQGTKLEIKRGGGGSGGGGSGGGGSQVQLQQPGAELVKPGASVKMSCKASGYAFSSYWINWMKQKPGQGLEWIGQIYPGDGDTNYNGKFKGRATLTADTSSSTAYMQLSSLTSEDSAVYFCARSITTVVGCAMDYWGQGTSVTVSSTRLWVSQPPEIRTLEGSSAFLPCSFNASQGRLAIGSVTWFRDEVVPGKEVRNGTPEFRGRLAPLASSRFLHDHQAELHIRDVRGHDASIYVCRVEVLGLGVGTGNGTRLVVEKEHPQLGAGTVLLLRAGFYAVSFLSVAVGSTVYYQGKCLTWKGPRRQLPAVVPAPLPPPCGSSAHLLPPVPGGRAKRSGSGVKQTLNFDLLKLAGDVESNPGPSRMYRMQLLSCIALSLALVTNSAPASSSTKKTQLQLEHLLLDLQMILNGINNYKNPKLTRMLTAKFAMPKKATELKHLQCLEEELKPLEEVLNGAQSKNFHLRPRDLISNINVIVLELKGSETTFMCEYADETATIVEFLNRWITFGQSIISTLTKIEVMYPPPYLDNEKSNGTIIHVKGKHLCPSPLFPGPSKPFWVLVVVGGVLACYSLLVTVAFIIFWVRSKRS

SEQ ID NO: 8405 - protein, 707 aa, Artificial Sequence
  Synthetic Polypeptide
MALPVTALLLPLALLLHAARPDIQMTQSPSSLSASVGDRVTITCKASDHINNWLAWYQQKPGQAPKLLIYGATTLETGVPSRFSGSGSGTDYTLTISSLQPEDFATYYCQQSWNTPWTFGQGTKLEIKRGGGGSGGGGSGGGGSQVQLQQPGAELVKPGASVKMSCKASGYAFSSYWINWMKQKPGQGLEWIGQIYPGDGDTNYNGKFKGRATLTADTSSSTAYMQLSSLTSEDSAVYFCARSITTVVGCAMDYWGQGTSVTVSSTRLWVSQPPEIRTLEGSSAFLPCSFNASQGRLAIGSVTWFRDEVVPGKEVRNGTPEFRGRLAPLASSRFLHDHQAELHIRDVRGHDASIYVCRVEVLGLGVGTGNGTRLVVEKEHPQLGAGTVLLLRAGFYAVSFLSVAVGSTVYYQGKCLTWKGPRRQLPAVVPAPLPPPCGSSAHLLPPVPGGRAKRSGSGVKQTLNFDLLKLAGDVESNPGPSRMYRMQLLSCIALSLALVTNSAPTSSSTKKTQLQLEHLLLDLQMILNGINNYKNPKLTEMLTAKFYMPKKATELKHLQCLEEELKPLEEVLNLAQSKNFHLRPRDLISNINVAVLELKGSETTFMCEYADETATIVEFLNRWITFCQSIISTLTKIEVMYPPPYLDNEKSNGTIIHVKGKHLCPSPLFPGPSKPFWVLVVVGGVLACYSLLVTVAFIIFWVRSKRS

SEQ ID NO: 8406 - protein, 688 aa, Artificial Sequence
  Synthetic Polypeptide
MALPVTALLLPLALLLHAARPDIQMTQSPSSLSASVGDRVTITCKASDHINNWLAWYQQKPGQAPKLLIYGATTLETGVPSRFSGSGSGTDYTLTISSLQPEDFATYYCQQSWNTPWTFGQGTKLEIKRGGGGSGGGGSGGGGSQVQLQQPGAELVKPGASVKMSCKASGYAFSSYWINWMKQKPGQGLEWIGQIYPGDGDTNYNGKFKGRATLTADTSSSTAYMQLSSLTSEDSAVYFCARSITTVVGCAMDYWGQGTSVTVSSTRLWVSQPPEIRTLEGSSAFLPCSFNASQGRLAIGSVTWFRDEVVPGKEVRNGTPEFRGRLAPLASSRFLHDHQAELHIRDVRGHDASIYVCRVEVLGLGVGTGNGTRLVVEKEHPQLGAGTVLLLRAGFYAVSFLSVAVGSTVYYQGKCLTWKGPRRQLPAVVPAPLPPPCGSSAHLLPPVPGGRAKRSGSGVKQTLNFDLLKLAGDVESNPGPSRMYRMQLLSCIALSLALVTNSNWVNVISDLKKIEDLIQSMHIDATLYTESDVHPSCKVTAMKCFLLELQVISLESGDASIHDTVKNLIILANNSLSSNGNVTESGCKECEELEEKNIKEFLQSFVHIVQMFINTSKIEVMYPPPYLDNEKSNGTIIHVKGKHLCPSPLFPGPSKPFWVLVVVGGVLACYSLLVTVAFIIFWVRSKRS

SEQ ID NO: 8407 - protein, 688 aa, Artificial Sequence
  Synthetic Polypeptide
MALPVTALLLPLALLLHAARPDIQMTQSPSSLSASVGDRVTITCKASDHINNWLAWYQQKPGQAPKLLIYGATTLETGVPSRFSGSGSGTDYTLTISSLQPEDFATYYCQQSWNTPWTFGQGTKLEIKRGGGGSGGGGSGGGGSQVQLQQPGAELVKPGASVKMSCKASGYAFSSYWINWMKQKPGQGLEWIGQIYPGDGDTNYNGKFKGRATLTADTSSSTAYMQLSSLTSEDSAVYFCARSITTVVGCAMDYWGQGTSVTVSSTRLWVSQPPEIRTLEGSSAFLPCSFNASQGRLAIGSVTWFRDEVVPGKEVRNGTPEFRGRLAPLASSRFLHDHQAELHIRDVRGHDASIYVCRVEVLGLGVGTGNGTRLVVEKEHPQLGAGTVLLLRAGFYAVSFLSVAVGSTVYYQGKCLTWKGPRRQLPAVVPAPLPPPCGSSAHLLPPVPGGRAKRSGSGVKQTLNFDLLKLAGDVESNPGPSRMYRMQLLSCIALSLALVTNSNWVNVISDLKKIEDLIQSMHIDATLYTESDVHPSCKVTAMKCFLLELQVISLESGDASIHDTVENLIIRANNSLSSNGNVTESGCKECEELEEKNIKEFLQSFVHIVQMFINTSKIEVMYPPPYLDNEKSNGTIIHVKGKHLCPSPLFPGPSKPFWVLVVVGGVLACYSLLVTVAFIIFWVRSKRS

SEQ ID NO: 8408 - protein, 688 aa, Artificial Sequence
  Synthetic Polypeptide
MALPVTALLLPLALLLHAARPDIQMTQSPSSLSASVGDRVTITCKASDHINNWLAWYQQKPGQAPKLLIYGATTLETGVPSRFSGSGSGTDYTLTISSLQPEDFATYYCQQSWNTPWTFGQGTKLEIKRGGGGSGGGGSGGGGSQVQLQQPGAELVKPGASVKMSCKASGYAFSSYWINWMKQKPGQGLEWIGQIYPGDGDTNYNGKFKGRATLTADTSSSTAYMQLSSLTSEDSAVYFCARSITTVVGCAMDYWGQGTSVTVSSTRLWVSQPPEIRTLEGSSAFLPCSFNASQGRLAIGSVTWFRDEVVPGKEVRNGTPEFRGRLAPLASSRFLHDHQAELHIRDVRGHDASIYVCRVEVLGLGVGTGNGTRLVVEKEHPQLGAGTVLLLRAGFYAVSFLSVAVGSTVYYQGKCLTWKGPRRQLPAVVPAPLPPPCGSSAHLLPPVPGGRAKRSGSGVKQTLNFDLLKLAGDVESNPGPSRMYRMQLLSCIALSLALVTNSNWVNVISSLKKIEDLIQSMHIDATLYTESDVHPSCKVTAMKCFLLELQVISLESGDASIHDTVENLIILANNSLSSNGNVTESGCKECEELEEKNIKEFLQSFVHIVQMFINTSKIEVMYPPPYLDNEKSNGTIIHVKGKHLCPSPLFPGPSKPFWVLVVVGGVLACYSLLVTVAFIIFWVRSKRS

SEQ ID NO: 8409 - protein, 880 aa, Artificial Sequence
  Synthetic Polypeptide
MALPVTALLLPLALLLHAARPDIQMTQSPSSLSASVGDRVTITCKASDHINNWLAWYQQKPGQAPKLLIYGATTLETGVPSRFSGSGSGTDYTLTISSLQPEDFATYYCQQSWNTPWTFGQGTKLEIKRLEADVSPKPTIFLPSIAETKLQKAGTYLCLLEKFFPDVIKIHWQEKKSNTILGSQEGNTMKTNDTYMKFSWLTVPEKSLDKEHRCIVRHENNKNGVDQEIIFPPIKTDVITMDPKDNCSKDANDTLLLQLTNTSAYYMYLLLLLKSVVYFAIITCCLLRRTAFCCNGEKSRAKRSGSGATNFSLLKQAGDVEENPGPTSMDWIWRILFLVGAATGAHSFEQVQLQQPGAELVKPGASVKMSCKASGYAFSSYWINWMKQKPGQGLEWIGQIYPGDGDTNYNGKFKGRATLTADTSSSTAYMQLSSLTSEDSAVYFCARSITTVVGCAMDYWGQGTSVTVSSTRPHTKPSVFVMKNGTNVACLVKEFYPKDIRINLVSSKKITEFDPAIVISPSGKYNAVKLGKYEDSNSVTCSVQHDNKTVHSTDFEVKTDSTDHVKPKETENTKQPSKSCHKPKAIVHTEKVNMMSLTVLGLRMLFAKTVAVNFLLTAKLFFLRAKRSGSGVKQTLNFDLLKLAGDVESNPGPSRMYRMQLLSCIDLSLALVTNSAPTSSSTKKTQLQLEHLLLDLQMILNGINNYKNPKLTEMLTAKFYMPKKATELKHLQCLEEELKPLEEVLNLAQSKNFHLRPRDLISNINVIVLELKGSETTFMCEYADETATIVEFLNRWITFCQSIISTLTKIEVMYPPPYLDNEKSNGTIIHVKGKHLCPSPLFPGPSKPFWVLVVVGGVLACYSLLVTVAFIIFWVRSKRS

SEQ ID NO: 8410 - protein, 880 aa, Artificial Sequence
  Synthetic Polypeptide
MALPVTALLLPLALLLHAARPDIQMTQSPSSLSASVGDRVTITCKASDHINNWLAWYQQKPGQAPKLLIYGATTLETGVPSRFSGSGSGTDYTLTISSLQPEDFATYYCQQSWNTPWTFGQGTKLEIKRLEADVSPKPTIFLPSIAETKLQKAGTYLCLLEKFFPDVIKIHWQEKKSNTILGSQEGNTMKTNDTYMKFSWLTVPEKSLDKEHRCIVRHENNKNGVDQEIIFPPIKTDVITMDPKDNCSKDANDTLLLQLTNTSAYYMYLLLLLKSVVYFAIITCCLLRRTAFCCNGEKSRAKRSGSGATNFSLLKQAGDVEENPGPTSMDWIWRILFLVGAATGAHSFEQVQLQQPGAELVKPGASVKMSCKASGYAFSSYWINWMKQKPGQGLEWIGQIYPGDGDTNYNGKFKGRATLTADTSSSTAYMQLSSLTSEDSAVYFCARSITTVVGCAMDYWGQGTSVTVSSTRPHTKPSVFVMKNGTNVACLVKEFYPKDIRINLVSSKKITEFDPAIVISPSGKYNAVKLGKYEDSNSVTCSVQHDNKTVHSTDFEVKTDSTDHVKPKETENTKQPSKSCHKPKAIVHTEKVNMMSLTVLGLRMLFAKTVAVNFLLTAKLFFLRAKRSGSGVKQTLNFDLLKLAGDVESNPGPSRMYRMQLLSCIALSLALVTNSAPTSSSTKKTQLQLEHLLLDLQMILNGINNYKNPKLTAMLTKKFYMPKKATELKHLQCLEEELKPLEEVLNLAQSKNFHLRPRDLISNINVIVLELKGSETTFMCEYADETATIVEFLNRWITFCASIISTLTKIEVMYPPPYLDNEKSNGTIIHVKGKHLCPSPLFPGPSKPFWVLVVVGGVLACYSLLVTVAFIIFWVRSKRS

SEQ ID NO: 8411 - protein, 880 aa, Artificial Sequence
  Synthetic Polypeptide
MALPVTALLLPLALLLHAARPDIQMTQSPSSLSASVGDRVTITCKASDHINNWLAWYQQKPGQAPKLLIYGATTLETGVPSRFSGSGSGTDYTLTISSLQPEDFATYYCQQSWNTPWTFGQGTKLEIKRLEADVSPKPTIFLPSIAETKLQKAGTYLCLLEKFFPDVIKIHWQEKKSNTILGSQEGNTMKTNDTYMKFSWLTVPEKSLDKEHRCIVRHENNKNGVDQEIIFPPIKTDVITMDPKDNCSKDANDTLLLQLTNTSAYYMYLLLLLKSVVYFAIITCCLLRRTAFCCNGEKSRAKRSGSGATNFSLLKQAGDVEENPGPTSMDWIWRILFLVGAATGAHSFEQVQLQQPGAELVKPGASVKMSCKASGYAFSSYWINWMKQKPGQGLEWIGQIYPGDGDTNYNGKFKGRATLTADTSSSTAYMQLSSLTSEDSAVYFCARSITTVVGCAMDYWGQGTSVTVSSTRPHTKPSVFVMKNGTNVACLVKEFYPKDIRINLVSSKKITEFDPAIVISPSGKYNAVKLGKYEDSNSVTCSVQHDNKTVHSTDFEVKTDSTDHVKPKETENTKQPSKSCHKPKAIVHTEKVNMMSLTVLGLRMLFAKTVAVNFLLTAKLFFLRAKRSGSGVKQTLNFDLLKLAGDVESNPGPSRMYRMQLLSCIALSLALVTNSAPASSSTKKTQLQLEHLLLDLQMILNGINNYKNPKLTRMLTAKFAMPKKATELKHLQCLEEELKPLEEVLNGAQSKNFHLRPRDLISNINVIVLELKGSETTFMCEYADETATIVEFLNRWITFGQSIISTLTKIEVMYPPPYLDNEKSNGTIIHVKGKHLCPSPLFPGPSKPFWVLVVVGGVLACYSLLVTVAFIIFWVRSKRS

SEQ ID NO: 8412 - protein, 880 aa, Artificial Sequence
  Synthetic Polypeptide
MALPVTALLLPLALLLHAARPDIQMTQSPSSLSASVGDRVTITCKASDHINNWLAWYQQKPGQAPKLLIYGATTLETGVPSRFSGSGSGTDYTLTISSLQPEDFATYYCQQSWNTPWTFGQGTKLEIKRLEADVSPKPTIFLPSIAETKLQKAGTYLCLLEKFFPDVIKIHWQEKKSNTILGSQEGNTMKTNDTYMKFSWLTVPEKSLDKEHRCIVRHENNKNGVDQEIIFPPIKTDVITMDPKDNCSKDANDTLLLQLTNTSAYYMYLLLLLKSVVYFAIITCCLLRRTAFCCNGEKSRAKRSGSGATNFSLLKQAGDVEENPGPTSMDWIWRILFLVGAATGAHSFEQVQLQQPGAELVKPGASVKMSCKASGYAFSSYWINWMKQKPGQGLEWIGQIYPGDGDTNYNGKFKGRATLTADTSSSTAYMQLSSLTSEDSAVYFCARSITTVVGCAMDYWGQGTSVTVSSTRPHTKPSVFVMKNGTNVACLVKEFYPKDIRINLVSSKKITEFDPAIVISPSGKYNAVKLGKYEDSNSVTCSVQHDNKTVHSTDFEVKTDSTDHVKPKETENTKQPSKSCHKPKAIVHTEKVNMMSLTVLGLRMLFAKTVAVNFLLTAKLFFLRAKRSGSGVKQTLNFDLLKLAGDVESNPGPSRMYRMQLLSCIALSLALVTNSAPTSSSTKKTQLQLEHLLLDLQMILNGINNYKNPKLTEMLTAKFYMPKKATELKHLQCLEEELKPLEEVLNLAQSKNFHLRPRDLISNINVAVLELKGSETTFMCEYADETATIVEFLNRWITFCQSIISTLTKIEVMYPPPYLDNEKSNGTIIHVKGKHLCPSPLFPGPSKPFWVLVVVGGVLACYSLLVTVAFIIFWVRSKRS

SEQ ID NO: 8413 - protein, 861 aa, Artificial Sequence
  Synthetic Polypeptide
MALPVTALLLPLALLLHAARPDIQMTQSPSSLSASVGDRVTITCKASDHINNWLAWYQQKPGQAPKLLIYGATTLETGVPSRFSGSGSGTDYTLTISSLQPEDFATYYCQQSWNTPWTFGQGTKLEIKRLEADVSPKPTIFLPSIAETKLQKAGTYLCLLEKFFPDVIKIHWQEKKSNTILGSQEGNTMKTNDTYMKFSWLTVPEKSLDKEHRCIVRHENNKNGVDQEIIFPPIKTDVITMDPKDNCSKDANDTLLLQLTNTSAYYMYLLLLLKSVVYFAIITCCLLRRTAFCCNGEKSRAKRSGSGATNFSLLKQAGDVEENPGPTSMDWIWRILFLVGAATGAHSFEQVQLQQPGAELVKPGASVKMSCKASGYAFSSYWINWMKQKPGQGLEWIGQIYPGDGDTNYNGKFKGRATLTADTSSSTAYMQLSSLTSEDSAVYFCARSITTVVGCAMDYWGQGTSVTVSSTRPHTKPSVFVMKNGTNVACLVKEFYPKDIRINLVSSKKITEFDPAIVISPSGKYNAVKLGKYEDSNSVTCSVQHDNKTVHSTDFEVKTDSTDHVKPKETENTKQPSKSCHKPKAIVHTEKVNMMSLTVLGLRMLFAKTVAVNFLLTAKLFFLRAKRSGSGVKQTLNFDLLKLAGDVESNPGPSRMYRMQLLSCIALSLALVTNSNWVNVISDLKKIEDLIQSMHIDATLYTESDVHPSCKVTAMKCFLLELQVISLESGDASIHDTVKNLIILANNSLSSNGNVTESGCKECEELEEKNIKEFLQSFVHIVQMFINTSKIEVMYPPPYLDNEKSNGTIIHVKGKHLCPSPLFPGPSKPFWVLVVVGGVLACYSLLVTVAFIIFWVRSKRS

SEQ ID NO: 8414 - protein, 861 aa, Artificial Sequence
  Synthetic Polypeptide
MALPVTALLLPLALLLHAARPDIQMTQSPSSLSASVGDRVTITCKASDHINNWLAWYQQKPGQAPKLLIYGATTLETGVPSRFSGSGSGTDYTLTISSLQPEDFATYYCQQSWNTPWTFGQGTKLEIKRLEADVSPKPTIFLPSIAETKLQKAGTYLCLLEKFFPDVIKIHWQEKKSNTILGSQEGNTMKTNDTYMKFSWLTVPEKSLDKEHRCIVRHENNKNGVDQEIIFPPIKTDVITMDPKDNCSKDANDTLLLQLTNTSAYYMYLLLLLKSVVYFAIITCCLLRRTAFCCNGEKSRAKRSGSGATNFSLLKQAGDVEENPGPTSMDWIWRILFLVGAATGAHSFEQVQLQQPGAELVKPGASVKMSCKASGYAFSSYWINWMKQKPGQGLEWIGQIYPGDGDTNYNGKFKGRATLTADTSSSTAYMQLSSLTSEDSAVYFCARSITTVVGCAMDYWGQGTSVTVSSTRPHTKPSVFVMKNGTNVACLVKEFYPKDIRINLVSSKKITEFDPAIVISPSGKYNAVKLGKYEDSNSVTCSVQHDNKTVHSTDFEVKTDSTDHVKPKETENTKQPSKSCHKPKAIVHTEKVNMMSLTVLGLRMLFAKTVAVNFLLTAKLFFLRAKRSGSGVKQTLNFDLLKLAGDVESNPGPSRMYRMQLLSCIALSLALVTNSNWVNVISSLKKIEDLIQSMHIDATLYTESDVHPSCKVTAMKCFLLELQVISLESGDASIHDTVENLIILANNSLSSNGNVTESGCKECEELEEKNIKEFLQSFVHIVQMFINTSKIEVMYPPPYLDNEKSNGTIIHVKGKHLCPSPLFPGPSKPFWVLVVVGGVLACYSLLVTVAFIIFWVRSKRS

SEQ ID NO: 8415 - protein, 861 aa, Artificial Sequence
  Synthetic Polypeptide
MALPVTALLLPLALLLHAARPDIQMTQSPSSLSASVGDRVTITCKASDHINNWLAWYQQKPGQAPKLLIYGATTLETGVPSRFSGSGSGTDYTLTISSLQPEDFATYYCQQSWNTPWTFGQGTKLEIKRLEADVSPKPTIFLPSIAETKLQKAGTYLCLLEKFFPDVIKIHWQEKKSNTILGSQEGNTMKTNDTYMKFSWLTVPEKSLDKEHRCIVRHENNKNGVDQEIIFPPIKTDVITMDPKDNCSKDANDTLLLQLTNTSAYYMYLLLLLKSVVYFAIITCCLLRRTAFCCNGEKSRAKRSGSGATNFSLLKQAGDVEENPGPTSMDWIWRILFLVGAATGAHSFEQVQLQQPGAELVKPGASVKMSCKASGYAFSSYWINWMKQKPGQGLEWIGQIYPGDGDTNYNGKFKGRATLTADTSSSTAYMQLSSLTSEDSAVYFCARSITTVVGCAMDYWGQGTSVTVSSTRPHTKPSVFVMKNGTNVACLVKEFYPKDIRINLVSSKKITEFDPAIVISPSGKYNAVKLGKYEDSNSVTCSVQHDNKTVHSTDFEVKTDSTDHVKPKETENTKQPSKSCHKPKAIVHTEKVNMMSLTVLGLRMLFAKTVAVNFLLTAKLFFLRAKRSGSGVKQTLNFDLLKLAGDVESNPGPSRMYRMQLLSCIALSLALVTNSNWVNVISDLKKIEDLIQSMHIDATLYTESDVHPSCKVTAMKCFLLELQVISLESGDASIHDTVENLIIRANNSLSSNGNVTESGCKECEELEEKNIKEFLQSFVHIVQMFINTSKIEVMYPPPYLDNEKSNGTIIHVKGKHLCPSPLFPGPSKPFWVLVVVGGVLACYSLLVTVAFIIFWVRSKRS

SEQ ID NO: 8416 - protein, 779 aa, Artificial Sequence
  Synthetic Polypeptide
MALPVTALLLPLALLLHAARPDIQMTQSPSSLSASVGDRVTITCKASDHINNWLAWYQQKPGQAPKLLIYGATTLETGVPSRFSGSGSGTDYTLTISSLQPEDFATYYCQQSWNTPWTFGQGTKLEIKRGGGGSGGGGSGGGGSQVQLQQPGAELVKPGASVKMSCKASGYAFSSYWINWMKQKPGQGLEWIGQIYPGDGDTNYNGKFKGRATLTADTSSSTAYMQLSSLTSEDSAVYFCARSITTVVGCAMDYWGQGTSVTVSSTRGGGGSGGGGSGGGGSARGMRTEDLPKAVVFLEPQWYRVLEKDSVTLKCQGAYSPEDNSTQWFHNESLISSQASSYFIDAATVDDSGEYRCQTNLSTLSDPVQLEVHIGWLLLQAPRWVFKEEDPIHLRCHSWKNTALHKVTYLQNGKGRKYFHHNSDFYIPKATLKDSGSYFCRGLVGSKNVSSETVNITITQGLAVPTISSFFPPGYQVSFCLVMVLLFAVDTGLYFSVKTNIRSSTRDWKDHKFKWRKDPQDKRAKRSGSGVKQTLNFDLLKLAGDVESNPGPSRMYRMQLLSCIALSLALVTNSAPTSSSTKKTQLQLEHLLLDLQMILNGINNYKNPKLTAMLTKKFYMPKKATELKHLQCLEEELKPLEEVLNLAQSKNFHLRPRDLISNINVIVLELKGSETTFMCEYADETATIVEFLNRWITFCASIISTLTKIEVMYPPPYLDNEKSNGTIIHVKGKHLCPSPLFPGPSKPFWVLVVVGGVLACYSLLVTVAFIIFWVRSKRS

SEQ ID NO: 8417 - protein, 779 aa, Artificial Sequence
  Synthetic Polypeptide
MALPVTALLLPLALLLHAARPDIQMTQSPSSLSASVGDRVTITCKASDHINNWLAWYQQKPGQAPKLLIYGATTLETGVPSRFSGSGSGTDYTLTISSLQPEDFATYYCQQSWNTPWTFGQGTKLEIKRGGGGSGGGGSGGGGSQVQLQQPGAELVKPGASVKMSCKASGYAFSSYWINWMKQKPGQGLEWIGQIYPGDGDTNYNGKFKGRATLTADTSSSTAYMQLSSLTSEDSAVYFCARSITTVVGCAMDYWGQGTSVTVSSTRGGGGSGGGGSGGGGSARGMRTEDLPKAVVFLEPQWYRVLEKDSVTLKCQGAYSPEDNSTQWFHNESLISSQASSYFIDAATVDDSGEYRCQTNLSTLSDPVQLEVHIGWLLLQAPRWVFKEEDPIHLRCHSWKNTALHKVTYLQNGKGRKYFHHNSDFYIPKATLKDSGSYFCRGLVGSKNVSSETVNITITQGLAVPTISSFFPPGYQVSFCLVMVLLFAVDTGLYFSVKTNIRSSTRDWKDHKFKWRKDPQDKRAKRSGSGVKQTLNFDLLKLAGDVESNPGPSRMYRMQLLSCIALSLALVTNSAPASSSTKKTQLQLEHLLLDLQMILNGINNYKNPKLTRMLTAKFAMPKKATELKHLQCLEEELKPLEEVLNGAQSKNFHLRPRDLISNINVIVLELKGSETTFMCEYADETATIVEFLNRWITFGQSIISTLTKIEVMYPPPYLDNEKSNGTIIHVKGKHLCPSPLFPGPSKPFWVLVVVGGVLACYSLLVTVAFIIFWVRSKRS

SEQ ID NO: 8418 - protein, 779 aa, Artificial Sequence
  Synthetic Polypeptide
MALPVTALLLPLALLLHAARPDIQMTQSPSSLSASVGDRVTITCKASDHINNWLAWYQQKPGQAPKLLIYGATTLETGVPSRFSGSGSGTDYTLTISSLQPEDFATYYCQQSWNTPWTFGQGTKLEIKRGGGGSGGGGSGGGGSQVQLQQPGAELVKPGASVKMSCKASGYAFSSYWINWMKQKPGQGLEWIGQIYPGDGDTNYNGKFKGRATLTADTSSSTAYMQLSSLTSEDSAVYFCARSITTVVGCAMDYWGQGTSVTVSSTRGGGGSGGGGSGGGGSARGMRTEDLPKAVVFLEPQWYRVLEKDSVTLKCQGAYSPEDNSTQWFHNESLISSQASSYFIDAATVDDSGEYRCQTNLSTLSDPVQLEVHIGWLLLQAPRWVFKEEDPIHLRCHSWKNTALHKVTYLQNGKGRKYFHHNSDFYIPKATLKDSGSYFCRGLVGSKNVSSETVNITITQGLAVPTISSFFPPGYQVSFCLVMVLLFAVDTGLYFSVKTNIRSSTRDWKDHKFKWRKDPQDKRAKRSGSGVKQTLNFDLLKLAGDVESNPGPSRMYRMQLLSCIALSLALVTNSAPTSSSTKKTQLQLEHLLLDLQMILNGINNYKNPKLTEMLTAKFYMPKKATELKHLQCLEEELKPLEEVLNLAQSKNFHLRPRDLISNINVAVLELKGSETTFMCEYADETATIVEFLNRWITFCQSIISTLTKIEVMYPPPYLDNEKSNGTIIHVKGKHLCPSPLFPGPSKPFWVLVVVGGVLACYSLLVTVAFIIFWVRSKRS

SEQ ID NO: 8419 - protein, 760 aa, Artificial Sequence
  Synthetic Polypeptide
MALPVTALLLPLALLLHAARPDIQMTQSPSSLSASVGDRVTITCKASDHINNWLAWYQQKPGQAPKLLIYGATTLETGVPSRFSGSGSGTDYTLTISSLQPEDFATYYCQQSWNTPWTFGQGTKLEIKRGGGGSGGGGSGGGGSQVQLQQPGAELVKPGASVKMSCKASGYAFSSYWINWMKQKPGQGLEWIGQIYPGDGDTNYNGKFKGRATLTADTSSSTAYMQLSSLTSEDSAVYFCARSITTVVGCAMDYWGQGTSVTVSSTRGGGGSGGGGSGGGGSARGMRTEDLPKAVVFLEPQWYRVLEKDSVTLKCQGAYSPEDNSTQWFHNESLISSQASSYFIDAATVDDSGEYRCQTNLSTLSDPVQLEVHIGWLLLQAPRWVFKEEDPIHLRCHSWKNTALHKVTYLQNGKGRKYFHHNSDFYIPKATLKDSGSYFCRGLVGSKNVSSETVNITITQGLAVPTISSFFPPGYQVSFCLVMVLLFAVDTGLYFSVKTNIRSSTRDWKDHKFKWRKDPQDKRAKRSGSGVKQTLNFDLLKLAGDVESNPGPSRMYRMQLLSCIALSLALVTNSNWVNVISDLKKIEDLIQSMHIDATLYTESDVHPSCKVTAMKCFLLELQVISLESGDASIHDTVENLIIRANNSLSSNGNVTESGCKECEELEEKNIKEFLQSFVHIVQMFINTSKIEVMYPPPYLDNEKSNGTIIHVKGKHLCPSPLFPGPSKPFWVLVVVGGVLACYSLLVTVAFIIFWVRSKRS

SEQ ID NO: 8420 - protein, 779 aa, Artificial Sequence
  Synthetic Polypeptide
MALPVTALLLPLALLLHAARPDIQMTQSPSSLSASVGDRVTITCKASDHINNWLAWYQQKPGQAPKLLIYGATTLETGVPSRFSGSGSGTDYTLTISSLQPEDFATYYCQQSWNTPWTFGQGTKLEIKRGGGGSGGGGSGGGGSQVQLQQPGAELVKPGASVKMSCKASGYAFSSYWINWMKQKPGQGLEWIGQIYPGDGDTNYNGKFKGRATLTADTSSSTAYMQLSSLTSEDSAVYFCARSITTVVGCAMDYWGQGTSVTVSSTRGGGGSGGGGSGGGGSARGMRTEDLPKAVVFLEPQWYRVLEKDSVTLKCQGAYSPEDNSTQWFHNESLISSQASSYFIDAATVDDSGEYRCQTNLSTLSDPVQLEVHIGWLLLQAPRWVFKEEDPIHLRCHSWKNTALHKVTYLQNGKGRKYFHHNSDFYIPKATLKDSGSYFCRGLVGSKNVSSETVNITITQGLAVPTISSFFPPGYQVSFCLVMVLLFAVDTGLYFSVKTNIRSSTRDWKDHKFKWRKDPQDKRAKRSGSGVKQTLNFDLLKLAGDVESNPGPSRMYRMQLLSCIALSLALVTNSAPTSSSTKKTQLQLEHLLLDLQMILNGINNYKNPKLTEMLTAKFYMPKKATELKHLQCLEEELKPLEEVLNLAQSKNFHLRPRDLISNINVIVLELKGSETTFMCEYADETATIVEFLNRWITFCQSIISTLTKIEVMYPPPYLDNEKSNGTIIHVKGKHLCPSPLFPGPSKPFWVLVVVGGVLACYSLLVTVAFIIFWVRSKRS

SEQ ID NO: 8421 - protein, 760 aa, Artificial Sequence
  Synthetic Polypeptide
MALPVTALLLPLALLLHAARPDIQMTQSPSSLSASVGDRVTITCKASDHINNWLAWYQQKPGQAPKLLIYGATTLETGVPSRFSGSGSGTDYTLTISSLQPEDFATYYCQQSWNTPWTFGQGTKLEIKRGGGGSGGGGSGGGGSQVQLQQPGAELVKPGASVKMSCKASGYAFSSYWINWMKQKPGQGLEWIGQIYPGDGDTNYNGKFKGRATLTADTSSSTAYMQLSSLTSEDSAVYFCARSITTVVGCAMDYWGQGTSVTVSSTRGGGGSGGGGSGGGGSARGMRTEDLPKAVVFLEPQWYRVLEKDSVTLKCQGAYSPEDNSTQWFHNESLISSQASSYFIDAATVDDSGEYRCQTNLSTLSDPVQLEVHIGWLLLQAPRWVFKEEDPIHLRCHSWKNTALHKVTYLQNGKGRKYFHHNSDFYIPKATLKDSGSYFCRGLVGSKNVSSETVNITITQGLAVPTISSFFPPGYQVSFCLVMVLLFAVDTGLYFSVKTNIRSSTRDWKDHKFKWRKDPQDKRAKRSGSGVKQTLNFDLLKLAGDVESNPGPSRMYRMQLLSCIALSLALVTNSNWVNVISDLKKIEDLIQSMHIDATLYTESDVHPSCKVTAMKCFLLELQVISLESGDASIHDTVKNLIILANNSLSSNGNVTESGCKECEELEEKNIKEFLQSFVHIVQMFINTSKIEVMYPPPYLDNEKSNGTIIHVKGKHLCPSPLFPGPSKPFWVLVVVGGVLACYSLLVTVAFIIFWVRSKRS

SEQ ID NO: 8422 - protein, 760 aa, Artificial Sequence
  Synthetic Polypeptide
MALPVTALLLPLALLLHAARPDIQMTQSPSSLSASVGDRVTITCKASDHINNWLAWYQQKPGQAPKLLIYGATTLETGVPSRFSGSGSGTDYTLTISSLQPEDFATYYCQQSWNTPWTFGQGTKLEIKRGGGGSGGGGSGGGGSQVQLQQPGAELVKPGASVKMSCKASGYAFSSYWINWMKQKPGQGLEWIGQIYPGDGDTNYNGKFKGRATLTADTSSSTAYMQLSSLTSEDSAVYFCARSITTVVGCAMDYWGQGTSVTVSSTRGGGGSGGGGSGGGGSARGMRTEDLPKAVVFLEPQWYRVLEKDSVTLKCQGAYSPEDNSTQWFHNESLISSQASSYFIDAATVDDSGEYRCQTNLSTLSDPVQLEVHIGWLLLQAPRWVFKEEDPIHLRCHSWKNTALHKVTYLQNGKGRKYFHHNSDFYIPKATLKDSGSYFCRGLVGSKNVSSETVNITITQGLAVPTISSFFPPGYQVSFCLVMVLLFAVDTGLYFSVKTNIRSSTRDWKDHKFKWRKDPQDKRAKRSGSGVKQTLNFDLLKLAGDVESNPGPSRMYRMQLLSCIALSLALVTNSNWVNVISSLKKIEDLIQSMHIDATLYTESDVHPSCKVTAMKCFLLELQVISLESGDASIHDTVENLIILANNSLSSNGNVTESGCKECEELEEKNIKEFLQSFVHIVQMFINTSKIEVMYPPPYLDNEKSNGTIIHVKGKHLCPSPLFPGPSKPFWVLVVVGGVLACYSLLVTVAFIIFWVRSKRS

SEQ ID NO: 8423 - protein, 880 aa, Artificial Sequence
  Synthetic Polypeptide
MALPVTALLLPLALLLHAARPDIQMTQSPSSLSASVGDRVTITCKASDHINNWLAWYQQKPGQAPKLLIYGATTLETGVPSRFSGSGSGTDYTLTISSLQPEDFATYYCQQSWNTPWTFGQGTKLEIKRLEADVSPKPTIFLPSIAETKLQKAGTYLCLLEKFFPDVIKIHWQEKKSNTILGSQEGNTMKTNDTYMKFSWLTVPEKSLDKEHRCIVRHENNKNGVDQEIIFPPIKTDVITMDPKDNCSKDANDTLLLQLTNTSAYYMYLLLLLKSVVYFAIITCCLLRRTAFCCNGEKSRAKRSGSGATNFSLLKQAGDVEENPGPTSMDWIWRILFLVGAATGAHSFEQVQLQQPGAELVKPGASVKMSCKASGYAFSSYWINWMKQKPGQGLEWIGQIYPGDGDTNYNGKFKGRATLTADTSSSTAYMQLSSLTSEDSAVYFCARSITTVVGCAMDYWGQGTSVTVSSTRPHTKPSVFVMKNGTNVACLVKEFYPKDIRINLVSSKKITEFDPAIVISPSGKYNAVKLGKYEDSNSVTCSVQHDNKTVHSTDFEVKTDSTDHVKPKETENTKQPSKSCHKPKAIVHTEKVNMMSLTVLGLRMLFAKTVAVNFLLTAKLFFLRAKRSGSGVKQTLNFDLLKLAGDVESNPGPSRMYRMQLLSCIALSLALVTNSAPTSSSTKKTQLQLEHLLLDLQMILNGINNYKNPKLTEMLTAKFYMPKKATELKHLQCLEEELKPLEEVLNLAQSKNFHLRPRDLISNINVIVLELKGSETTFMCEYADETATIVEFLNRWITFCQSIISTLTKIEVMYPPPYLDNEKSNGTIIHVKGKHLCPSPLFPGPSKPFWVLVVVGGVLACYSLLVTVAFIIFWVRSKRS

SEQ ID NO: 8424 - protein, 1075 aa, Artificial Sequence
  Synthetic Polypeptide
MALPVTALLLPLALLLHAARPDIQMTQSPSSLSASVGDRVTITCKASDHINNWLAWYQQKPGQAPKLLIYGATTLETGVPSRFSGSGSGTDYTLTISSLQPEDFATYYCQQSWNTPWTFGQGTKLEIKRLEDLKNVFPPEVAVFEPSEAEISHTQKATLVCLATGFYPDHVELSWWVNGKEVHSGVSTDPQPLKEQPALNDSRYCLSSRLRVSATFWQNPRNHFRCQVQFYGLSENDEWTQDRAKPVTQIVSAEAWGRADCGSQSFGLLDPKLCYLLDGILFIYGVILTALFLRVKFSRSADAPAYQQGQNQLYNELNLGRREEYDVLDKRRGRDPEMGGKPQRRKNPQEGLYNELQKDKMAEAYSEIGMKGERRRGKGHDGLYQGLSTATKDTYDALHMQALPPRRAKRSGSGATNFSLLKQAGDVEENPGPTSMDWIWRILFLVGAATGAHSFEQVQLQQPGAELVKPGASVKMSCKASGYAFSSYWINWMKQKPGQGLEWIGQIYPGDGDTNYNGKFKGRATLTADTSSSTAYMQLSSLTSEDSAVYFCARSITTVVGCAMDYWGQGTSVTVSSTRIQNPDPAVYQLRDSKSSDKSVCLFTDFDSQTNVSQSKDSDVYITDKTVLDMRSMDFKSNSAVAWSNKSDFACANAFNNSIIPEDTFFPSPESSCGTQSFGLLDPKLCYLLDGILFIYGVILTALFLRVKFSRSADAPAYQQGQNQLYNELNLGRREEYDVLDKRRGRDPEMGGKPQRRKNPQEGLYNELQKDKMAEAYSEIGMKGERRRGKGHDGLYQGLSTATKDTYDALHMQALPPRRAKRSGSGVKQTLNFDLLKLAGDVESNPGPSRMYRMQLLSCIALSLALVTNSAPTSSSTKKTQLQLEHLLLDLQMILNGINNYKNPKLTEMLTAKFYMPKKATELKHLQCLEEELKPLEEVLNLAQSKNFHLRPRDLISNINVIVLELKGSETTFMCEYADETATIVEFLNRWITFCQSIISTLTKIEVMYPPPYLDNEKSNGTIIHVKGKHLCPSPLFPGPSKPFWVLVVVGGVLACYSLLVTVAFIIFWVRSKRS

SEQ ID NO: 8425 - protein, 1075 aa, Artificial Sequence
  Synthetic Polypeptide
MALPVTALLLPLALLLHAARPDIQMTQSPSSLSASVGDRVTITCKASDHINNWLAWYQQKPGQAPKLLIYGATTLETGVPSRFSGSGSGTDYTLTISSLQPEDFATYYCQQSWNTPWTFGQGTKLEIKRLEDLKNVFPPEVAVFEPSEAEISHTQKATLVCLATGFYPDHVELSWWVNGKEVHSGVSTDPQPLKEQPALNDSRYCLSSRLRVSATFWQNPRNHFRCQVQFYGLSENDEWTQDRAKPVTQIVSAEAWGRADCGSQSFGLLDPKLCYLLDGILFIYGVILTALFLRVKFSRSADAPAYQQGQNQLYNELNLGRREEYDVLDKRRGRDPEMGGKPQRRKNPQEGLYNELQKDKMAEAYSEIGMKGERRRGKGHDGLYQGLSTATKDTYDALHMQALPPRRAKRSGSGATNFSLLKQAGDVEENPGPTSMDWIWRILFLVGAATGAHSFEQVQLQQPGAELVKPGASVKMSCKASGYAFSSYWINWMKQKPGQGLEWIGQIYPGDGDTNYNGKFKGRATLTADTSSSTAYMQLSSLTSEDSAVYFCARSITTVVGCAMDYWGQGTSVTVSSTRIQNPDPAVYQLRDSKSSDKSVCLFTDFDSQTNVSQSKDSDVYITDKTVLDMRSMDFKSNSAVAWSNKSDFACANAFNNSIIPEDTFFPSPESSCGTQSFGLLDPKLCYLLDGILFIYGVILTALFLRVKFSRSADAPAYQQGQNQLYNELNLGRREEYDVLDKRRGRDPEMGGKPQRRKNPQEGLYNELQKDKMAEAYSEIGMKGERRRGKGHDGLYQGLSTATKDTYDALHMQALPPRRAKRSGSGVKQTLNFDLLKLAGDVESNPGPSRMYRMQLLSCIALSLALVTNSAPTSSSTKKTQLQLEHLLLDLQMILNGINNYKNPKLTAMLTKKFYMPKKATELKHLQCLEEELKPLEEVLNLAQSKNFHLRPRDLISNINVIVLELKGSETTFMCEYADETATIVEFLNRWITFCASIISTLTKIEVMYPPPYLDNEKSNGTIIHVKGKHLCPSPLFPGPSKPFWVLVVVGGVLACYSLLVTVAFIIFWVRSKRS

SEQ ID NO: 8426 - protein, 1056 aa, Artificial Sequence
  Synthetic Polypeptide
MALPVTALLLPLALLLHAARPDIQMTQSPSSLSASVGDRVTITCKASDHINNWLAWYQQKPGQAPKLLIYGATTLETGVPSRFSGSGSGTDYTLTISSLQPEDFATYYCQQSWNTPWTFGQGTKLEIKRLEDLKNVFPPEVAVFEPSEAEISHTQKATLVCLATGFYPDHVELSWWVNGKEVHSGVSTDPQPLKEQPALNDSRYCLSSRLRVSATFWQNPRNHFRCQVQFYGLSENDEWTQDRAKPVTQIVSAEAWGRADCGSQSFGLLDPKLCYLLDGILFIYGVILTALFLRVKFSRSADAPAYQQGQNQLYNELNLGRREEYDVLDKRRGRDPEMGGKPQRRKNPQEGLYNELQKDKMAEAYSEIGMKGERRRGKGHDGLYQGLSTATKDTYDALHMQALPPRRAKRSGSGATNFSLLKQAGDVEENPGPTSMDWIWRILFLVGAATGAHSFEQVQLQQPGAELVKPGASVKMSCKASGYAFSSYWINWMKQKPGQGLEWIGQIYPGDGDTNYNGKFKGRATLTADTSSSTAYMQLSSLTSEDSAVYFCARSITTVVGCAMDYWGQGTSVTVSSTRIQNPDPAVYQLRDSKSSDKSVCLFTDFDSQTNVSQSKDSDVYITDKTVLDMRSMDFKSNSAVAWSNKSDFACANAFNNSIIPEDTFFPSPESSCGTQSFGLLDPKLCYLLDGILFIYGVILTALFLRVKFSRSADAPAYQQGQNQLYNELNLGRREEYDVLDKRRGRDPEMGGKPQRRKNPQEGLYNELQKDKMAEAYSEIGMKGERRRGKGHDGLYQGLSTATKDTYDALHMQALPPRRAKRSGSGVKQTLNFDLLKLAGDVESNPGPSRMYRMQLLSCIALSLALVTNSNWVNVISSLKKIEDLIQSMHIDATLYTESDVHPSCKVTAMKCFLLELQVISLESGDASIHDTVENLIILANNSLSSNGNVTESGCKECEELEEKNIKEFLQSFVHIVQMFINTSKIEVMYPPPYLDNEKSNGTIIHVKGKHLCPSPLFPGPSKPFWVLVVVGGVLACYSLLVTVAFIIFWVRSKRS

SEQ ID NO: 8427 - protein, 1056 aa, Artificial Sequence
  Synthetic Polypeptide
MALPVTALLLPLALLLHAARPDIQMTQSPSSLSASVGDRVTITCKASDHINNWLAWYQQKPGQAPKLLIYGATTLETGVPSRFSGSGSGTDYTLTISSLQPEDFATYYCQQSWNTPWTFGQGTKLEIKRLEDLKNVFPPEVAVFEPSEAEISHTQKATLVCLATGFYPDHVELSWWVNGKEVHSGVSTDPQPLKEQPALNDSRYCLSSRLRVSATFWQNPRNHFRCQVQFYGLSENDEWTQDRAKPVTQIVSAEAWGRADCGSQSFGLLDPKLCYLLDGILFIYGVILTALFLRVKFSRSADAPAYQQGQNQLYNELNLGRREEYDVLDKRRGRDPEMGGKPQRRKNPQEGLYNELQKDKMAEAYSEIGMKGERRRGKGHDGLYQGLSTATKDTYDALHMQALPPRRAKRSGSGATNFSLLKQAGDVEENPGPTSMDWIWRILFLVGAATGAHSFEQVQLQQPGAELVKPGASVKMSCKASGYAFSSYWINWMKQKPGQGLEWIGQIYPGDGDTNYNGKFKGRATLTADTSSSTAYMQLSSLTSEDSAVYFCARSITTVVGCAMDYWGQGTSVTVSSTRIQNPDPAVYQLRDSKSSDKSVCLFTDFDSQTNVSQSKDSDVYITDKTVLDMRSMDFKSNSAVAWSNKSDFACANAFNNSIIPEDTFFPSPESSCGTQSFGLLDPKLCYLLDGILFIYGVILTALFLRVKFSRSADAPAYQQGQNQLYNELNLGRREEYDVLDKRRGRDPEMGGKPQRRKNPQEGLYNELQKDKMAEAYSEIGMKGERRRGKGHDGLYQGLSTATKDTYDALHMQALPPRRAKRSGSGVKQTLNFDLLKLAGDVESNPGPSRMYRMQLLSCIALSLALVTNSNWVNVISDLKKIEDLIQSMHIDATLYTESDVHPSCKVTAMKCFLLELQVISLESGDASIHDTVENLIIRANNSLSSNGNVTESGCKECEELEEKNIKEFLQSFVHIVQMFINTSKIEVMYPPPYLDNEKSNGTIIHVKGKHLCPSPLFPGPSKPFWVLVVVGGVLACYSLLVTVAFIIFWVRSKRS

SEQ ID NO: 8428 - protein, 1077 aa, Artificial Sequence
  Synthetic Polypeptide
MALPVTALLLPLALLLHAARPDIQMTQSPSSLSASVGDRVTITCKASDHINNWLAWYQQKPGQAPKLLIYGATTLETGVPSRFSGSGSGTDYTLTISSLQPEDFATYYCQQSWNTPWTFGQGTKLEIKRLEDLKNVFPPEVAVFEPSEAEISHTQKATLVCLATGFYPDHVELSWWVNGKEVHSGVSTDPQPLKEQPALNDSRYCLSSRLRVSATFWQNPRNHFRCQVQFYGLSENDEWTQDRAKPVTQIVSAEAWGRADCGSQSFGLLDPKLCYLLDGILFIYGVILTALFLRVKFSRSADAPAYQQGQNQLYNELNLGRREEYDVLDKRRGRDPEMGGKPQRRKNPQEGLYNELQKDKMAEAYSEIGMKGERRRGKGHDGLYQGLSTATKDTYDALHMQALPPRRAKRSGSGATNFSLLKQAGDVEENPGPTSMDWIWRILFLVGAATGAHSFEQVQLQQPGAELVKPGASVKMSCKASGYAFSSYWINWMKQKPGQGLEWIGQIYPGDGDTNYNGKFKGRATLTADTSSSTAYMQLSSLTSEDSAVYFCARSITTVVGCAMDYWGQGTSVTVSSTRIQNPDPAVYQLRDSKSSDKSVCLFTDFDSQTNVSQSKDSDVYITDKTVLDMRSMDFKSNSAVAWSNKSDFACANAFNNSIIPEDTFFPSPESSCGTQSFGLLDPKLCYLLDGILFIYGVILTALFLRVKFSRSADAPAYQQGQNQLYNELNLGRREEYDVLDKRRGRDPEMGGKPQRRKNPQEGLYNELQKDKMAEAYSEIGMKGERRRGKGHDGLYQGLSTATKDTYDALHMQALPPRRAKRSGSGVKQTLNFDLLKLAGDVESNPGPSRMYRMQLLSCIALSLALVTNSAPTSSSTKKTQLQLEHLLLDLQMILNGINNYKNPKLTRMLTFKFYMPKKATELKHLQCLEEELKPLEEVLNLAQSKNFHLRPRDLISNINVIVLELKGSETTFMCEYADETATIVEFLNRWITFCQSIISTLTARKIEVMYPPPYLDNEKSNGTIIHVKGKHLCPSPLFPGPSKPFWVLVVVGGVLACYSLLVTVAFIIFWVRSKRS

SEQ ID NO: 8429 - protein, 947 aa, Artificial Sequence
  Synthetic Polypeptide
MALPVTALLLPLALLLHAARPDIQMTQSPSSLSASVGDRVTITCKASDHINNWLAWYQQKPGQAPKLLIYGATTLETGVPSRFSGSGSGTDYTLTISSLQPEDFATYYCQQSWNTPWTFGQGTKLEIKRLEDLKNVFPPEVAVFEPSEAEISHTQKATLVCLATGFYPDHVELSWWVNGKEVHSGVSTDPQPLKEQPALNDSRYCLSSRLRVSATFWQNPRNHFRCQVQFYGLSENDEWTQDRAKPVTQIVSAEAWGRADCGSQSFGLLDPKLCYLLDGILFIYGVILTALFLRVKFSRSADAPAYQQGQNQLYNELNLGRREEYDVLDKRRGRDPEMGGKPQRRKNPQEGLYNELQKDKMAEAYSEIGMKGERRRGKGHDGLYQGLSTATKDTYDALHMQALPPRRAKRSGSGATNFSLLKQAGDVEENPGPTSMDWIWRILFLVGAATGAHSFEQVQLQQPGAELVKPGASVKMSCKASGYAFSSYWINWMKQKPGQGLEWIGQIYPGDGDTNYNGKFKGRATLTADTSSSTAYMQLSSLTSEDSAVYFCARSITTVVGCAMDYWGQGTSVTVSSTRIQNPDPAVYQLRDSKSSDKSVCLFTDFDSQTNVSQSKDSDVYITDKTVLDMRSMDFKSNSAVAWSNKSDFACANAFNNSIIPEDTFFPSPESSCGTQSFGLLDPKLCYLLDGILFIYGVILTALFLRVKFSRSADAPAYQQGQNQLYNELNLGRREEYDVLDKRRGRDPEMGGKPQRRKNPQEGLYNELQKDKMAEAYSEIGMKGERRRGKGHDGLYQGLSTATKDTYDALHMQALPPRRAKRSGSGVKQTLNFDLLKLAGDVESNPGPSRMDWIWRILFLVGAATGAHSLQMAGQCSQNEYFDSLLHACIPCQLRCSSNTPPLTCQRYCNASVTNSVKGTNAILWTCLGLSLIISLAVFVLMFLLRK

SEQ ID NO: 8430 - protein, 1083 aa, Artificial Sequence
  Synthetic Polypeptide
MALPVTALLLPLALLLHAARPDIQMTQSPSSLSASVGDRVTITCKASDHINNWLAWYQQKPGQAPKLLIYGATTLETGVPSRFSGSGSGTDYTLTISSLQPEDFATYYCQQSWNTPWTFGQGTKLEIKRLEDLKNVFPPEVAVFEPSEAEISHTQKATLVCLATGFYPDHVELSWWVNGKEVHSGVSTDPQPLKEQPALNDSRYCLSSRLRVSATFWQNPRNHFRCQVQFYGLSENDEWTQDRAKPVTQIVSAEAWGRADCGSQSFGLLDPKLCYLLDGILFIYGVILTALFLRVKFSRSADAPAYQQGQNQLYNELNLGRREEYDVLDKRRGRDPEMGGKPQRRKNPQEGLYNELQKDKMAEAYSEIGMKGERRRGKGHDGLYQGLSTATKDTYDALHMQALPPRRAKRSGSGATNFSLLKQAGDVEENPGPTSMDWIWRILFLVGAATGAHSFEQVQLQQPGAELVKPGASVKMSCKASGYAFSSYWINWMKQKPGQGLEWIGQIYPGDGDTNYNGKFKGRATLTADTSSSTAYMQLSSLTSEDSAVYFCARSITTVVGCAMDYWGQGTSVTVSSTRIQNPDPAVYQLRDSKSSDKSVCLFTDFDSQTNVSQSKDSDVYITDKTVLDMRSMDFKSNSAVAWSNKSDFACANAFNNSIIPEDTFFPSPESSCGTQSFGLLDPKLCYLLDGILFIYGVILTALFLRVKFSRSADAPAYQQGQNQLYNELNLGRREEYDVLDKRRGRDPEMGGKPQRRKNPQEGLYNELQKDKMAEAYSEIGMKGERRRGKGHDGLYQGLSTATKDTYDALHMQALPPRRAKRSGSGVKQTLNFDLLKLAGDVESNPGPSRMYRMQLLSCIALSLALVTNSAPTSSSTKKTQLQLEHLLLDLQMILNGINNYKNPKLTRMLTFKFYMPKKATELKHLQCLEEELKPLEEVLNLAQSKNFHLRPRDLISNINVIVLELKGSETTFMCEYADETATIVEFLNRWITFCQSIISTLTHMLQMAGQCSQNEYFDSLLHACIPCQLRCSSNTPPLTCQRYCNASVTNSVKGTNAILWTCLGLSLIISLAVFVLMFLLRK

SEQ ID NO: 8431 - protein, 715 aa, Artificial Sequence
  Synthetic Polypeptide
MALPVTALLLPLALLLHAARPDIQMTQSPSSLSASVGDRVTITCKASDHINNWLAWYQQKPGQAPKLLIYGATTLETGVPSRFSGSGSGTDYTLTISSLQPEDFATYYCQQSWNTPWTFGQGTKLEIKRGGGGSGGGGSGGGGSQVQLQQPGAELVKPGASVKMSCKASGYAFSSYWINWMKQKPGQGLEWIGQIYPGDGDTNYNGKFKGRATLTADTSSSTAYMQLSSLTSEDSAVYFCARSITTVVGCAMDYWGQGTSVTVSSTRKIEVMYPPPYLDNEKSNGTIIHVKGARKSVRFYLVVSPASASTQTSWTPRDLVSSQTQTQSCVPPTAGARQAPESPSTIPVPSQPQNSTLRPGPAAPIALVPVFCGLLVAKSLVLSALLVWWGDIWWKTMMELRSLDTQKATCHLQQVTDLPWTSVSSPVEREILYHTVARTKISDDDDEHTLRAKRSGSGVKQTLNFDLLKLAGDVESNPGPSRMYRMQLLSCIALSLALVTNSAPTSSSTKKTQLQLEHLLLDLQMILNGINNYKNPKLTRMLTFKFYMPKKATELKHLQCLEEELKPLEEVLNLAQSKNFHLRPRDLISNINVIVLELKGSETTFMCEYADETATIVEFLNRWITFCQSIISTLTHMLQMAGQCSQNEYFDSLLHACIPCQLRCSSNTPPLTCQRYCNASVTNSVKGTNAILWTCLGLSLIISLAVFVLMFLLRK

SEQ ID NO: 8432 - protein, 652 aa, Artificial Sequence
  Synthetic Polypeptide
MALPVTALLLPLALLLHAARPDIQMTQSPSSLSASVGDRVTITCKASDHINNWLAWYQQKPGQAPKLLIYGATTLETGVPSRFSGSGSGTDYTLTISSLQPEDFATYYCQQSWNTPWTFGQGTKLEIKRGGGGSGGGGSGGGGSQVQLQQPGAELVKPGASVKMSCKASGYAFSSYWINWMKQKPGQGLEWIGQIYPGDGDTNYNGKFKGRATLTADTSSSTAYMQLSSLTSEDSAVYFCARSITTVVGCAMDYWGQGTSVTVSSTRKIEVMYPPPYLDNEKSNGTIIHVKGARGDIENTSLAPEDPTFPADTWGTYLLTTETGLQKDHALWDHTAQNLLRMGLAFLVLVALVWFLVEDWLSRKRTRERASRASTWEGRRRLNTQTLRAKRSGSGVKQTLNFDLLKLAGDVESNPGPSRMYRMQLLSCIALSLALVTNSAPTSSSTKKTQLQLEHLLLDLQMILNGINNYKNPKLTRMLTFKFYMPKKATELKHLQCLEEELKPLEEVLNLAQSKNFHLRPRDLISNINVIVLELKGSETTFMCEYADETATIVEFLNRWITFCQSIISTLTHMLQMAGQCSQNEYFDSLLHACIPCQLRCSSNTPPLTCQRYCNASVTNSVKGTNAILWTCLGLSLIISLAVFVLMFLLRK

SEQ ID NO: 8433 - protein, 609 aa, Artificial Sequence; identical to SEQ ID NO: 8378
  Synthetic Polypeptide

SEQ ID NO: 8434 - protein, 962 aa, Artificial Sequence
  Synthetic Polypeptide
MGWIRGRRSRHSWEMSEFHNYNLDLKKSDFSTRWQKQRCPVVKSKCRENASPFFFCCFIAVAMGIRFIIMVAIWSAVFLNSLFNQEVQIPLTESYCGPCPKNWICYKNNCYQFFDESKNWYESQASCMSQNASLLKVYSKEDQDLLKLVKSYHWMGLVHIPTNGSWQWEDGSILSPNLLTIIEMQKGDCALYASSFKGYIENCSTPNTYICMQRTVGGGGSGGGGSGGGGSEFDIQMTQSPSSLSASVGDRVTITCKASDHINNWLAWYQQKPGQAPKLLIYGATTLETGVPSRFSGSGSGTDYTLTISSLQPEDFATYYCQQSWNTPWTFGQGTKLEIKRLERAKRSGSGATNFSLLKQAGDVEENPGPTSTMGWIRGRRSRHSWEMSEFHNYNLDLKKSDFSTRWQKQRCPVVKSKCRENASPFFFCCFIAVAMGIRFIIMVAIWSAVFLNSLFNQEVQIPLTESYCGPCPKNWICYKNNCYQFFDESKNWYESQASCMSQNASLLKVYSKEDQDLLKLVKSYHWMGLVHIPTNGSWQWEDGSILSPNLLTIIEMQKGDCALYASSFKGYIENCSTPNTYICMQRTVGGGGSGGGGSGGGGSFEQVQLQQPGAELVKPGASVKMSCKASGYAFSSYWINWMKQKPGQGLEWIGQIYPGDGDTNYNGKFKGRATLTADTSSSTAYMQLSSLTSEDSAVYFCARSITTVVGCAMDYWGQGTSVTVSSTRRAKRSGSGVKQTLNFDLLKLAGDVESNPGPSRGHMTEYKPTVRLATRDDVPRAVRTLAAAFADYPATRHTVDPDRHIERVTELQELFLTRVGLDIGKVWVADDGAAVAVWTTPESVEAGAVFAEIGPRMAELSGSRLAAQQQMEGLLAPHRPKEPAWFLATVGVSPDHQGKGLGSAVVLPGVEAAERAGVPAFLETSAPRNLPFYERLGFTVTADVEVPEGPRTWCMTRKPGA

SEQ ID NO: 8435 - protein, 867 aa, Artificial Sequence
  Synthetic Polypeptide
MNKQRGTYSEVSLAQDPKRQQRKLKGNKSSISGTKQEIFQVELNLQNASSDHQGNDKTYHCKGLLPPPEKLTAEVLGIICIVLMATVLKTIVLIPCIGVLEQNSFSLNRRMQKARHCGHCPEEWITYSNSCYYIGKERRTWEERVCWPVLRRTLICFLGGGGSGGGGSGGGGSEFDIQMTQSPSSLSASVGDRVTITCKASDHINNWLAWYQQKPGQAPKLLIYGATTLETGVPSRFSGSGSGTDYTLTISSLQPEDFATYYCQQSWNTPWTFGQGTKLEIKRLERAKRSGSGATNFSLLKQAGDVEENPGPTSTMAVFKTTLWRLISGTLGIICLSLMSTLGILLKNSFTKLSIEPAFTPGPNIELQKDSDCCSCQEKWVGYRCNCYFISSEQKTWNESRHLCASQKSSLLQLQNTDELDFMSSSQQFYWIGLSYSEEHTAWLWENGSALSQYLFPSFETFNTKNCIAYNPNGNALDESCEDKNRYICKQQLIGGGGSGGGGSGGGGSFEQVQLQQPGAELVKPGASVKMSCKASGYAFSSYWINWMKQKPGQGLEWIGQIYPGDGDTNYNGKFKGRATLTADTSSSTAYMQLSSLTSEDSAVYFCARSITTVVGCAMDYWGQGTSVTVSSTRRAKRSGSGVKQTLNFDLLKLAGDVESNPGPSRGHMTEYKPTVRLATRDDVPRAVRTLAAAFADYPATRHTVDPDRHIERVTELQELFLTRVGLDIGKVWVADDGAAVAVWTTPESVEAGAVFAEIGPRMAELSGSRLAAQQQMEGLLAPHRPKEPAWFLATVGVSPDHQGKGLGSAVVLPGVEAAERAGVPAFLETSAPRNLPFYERLGFTVTADVEVPEGPRTWCMTRKPGA

SEQ ID NO: 8436 - protein, 966 aa, Artificial Sequence
  Synthetic Polypeptide
MNKQRGTFSEVSLAQDPKPQQRKPKGNKSSISGTEQEIFQVELNLQNASLNHQGIDKIYDCQGLLPPPEKLTAEVLGIICIVLMATVLKTIVLIPFLEQNNSSPNTRTQKARPCGHCPEEWITYSNSCYYIGKERRTWEESLQACASKNSSSLLSIDNEEEMKFLASILPSSWIGVFRNSSHHPWVTINGLAFKHEIKDSDHAERNCAMLHVRGLISDQCGSSRIIVSISFRIKALELAVHQIKFYICSNRNDIMIAGGGGSGGGGSGGGGSEFDIQMTQSPSSLSASVGDRVTITCKASDHINNWLAWYQQKPGQAPKLLIYGATTLETGVPSRFSGSGSGTDYTLTISSLQPEDFATYYCQQSWNTPWTFGQGTKLEIKRLERAKRSGSGATNFSLLKQAGDVEENPGPTSTMAVFKTTLWRLISGTLGIICLSLMSTLGILLKNSFTKLSIEPAFTPGPNIELQKDSDCCSCQEKWVGYRCNCYFISSEQKTWNESRHLCASQKSSLLQLQNTDELDFMSSSQQFYWIGLSYSEEHTAWLWENGSALSQYLFPSFETFNTKNCIAYNPNGNALDESCEDKNRYICKQQLIGGGGSGGGGSGGGGSFEQVQLQQPGAELVKPGASVKMSCKASGYAFSSYWINWMKQKPGQGLEWIGQIYPGDGDTNYNGKFKGRATLTADTSSSTAYMQLSSLTSEDSAVYFCARSITTVVGCAMDYWGQGTSVTVSSTRRAKRSGSGVKQTLNFDLLKLAGDVESNPGPSRGHMTEYKPTVRLATRDDVPRAVRTLAAAFADYPATRHTVDPDRHIERVTELQELFLTRVGLDIGKVWVADDGAAVAVWTTPESVEAGAVFAEIGPRMAELSGSRLAAQQQMEGLLAPHRPKEPAWFLATVGVSPDHQGKGLGSAVVLPGVEAAERAGVPAFLETSAPRNLPFYERLGFTVTADVEVPEGPRTWCMTRKPGA

SEQ ID NO: 8437 - protein, 942 aa, Artificial Sequence
  Synthetic Polypeptide
MDNQGVIYSDLNLPPNPKRQQRKPKGNKSSILATEQEITYAELNLQKASQDFQGNDKTYHCKDLPSAPEKLIVGILGIICLILMASVVTIVVIPSTLIQRHNNSSLNTRTQKARHCGHCPEEWITYSNSCYYIGKERRTWEESLLACTSKNSSLLSIDNEEEMKFLSIISPSSWIGVFRNSSHHPWVTMNGLAFKHEIKDSDNAELNCAVLQVNRLKSAQCGSSIIYHCKHKLGGGGSGGGGSGGGGSEFDIQMTQSPSSLSASVGDRVTITCKASDHINNWLAWYQQKPGQAPKLLIYGATTLETGVPSRFSGSGSGTDYTLTISSLQPEDFATYYCQQSWNTPWTFGQGTKLEIKRLERAKRSGSGATNFSLLKQAGDVEENPGPTSTMAVFKTTLWRLISGTLGIICLSLMSTLGILLKNSFTKLSIEPAFTPGPNIELQKDSDCCSCQEKWVGYRCNCYFISSEQKTWNESRHLCASQKSSLLQLQNTDELDFMSSSQQFYWIGLSYSEEHTAWLWENGSALSQYLFPSFETFNTKNCIAYNPNGNALDESCEDKNRYICKQQLIGGGGSGGGGSGGGGSFEQVQLQQPGAELVKPGASVKMSCKASGYAFSSYWINWMKQKPGQGLEWIGQIYPGDGDTNYNGKFKGRATLTADTSSSTAYMQLSSLTSEDSAVYFCARSITTVVGCAMDYWGQGTSVTVSSTRRAKRSGSGVKQTLNFDLLKLAGDVESNPGPSRGHMTEYKPTVRLATRDDVPRAVRTLAAAFADYPATRHTVDPDRHIERVTELQELFLTRVGLDIGKVWVADDGAAVAVWTTPESVEAGAVFAEIGPRMAELSGSRLAAQQQMEGLLAPHRPKEPAWFLATVGVSPDHQGKGLGSAVVLPGVEAAERAGVPAFLETSAPRNLPFYERLGFTVTADVEVPEGPRTWCMTRKPGA

SEQ ID NO: 8438 - protein, 710 aa, Artificial Sequence
  Synthetic Polypeptide
MALPVTALLLPLALLLHAARPQAVVTQEPSLTVSPGGTVTLTCRSSTGAVTTSNYANWVQQKPGQAPRGLIGGTNKRAPWTPARFSGSLLGGKAALTLSGVQPEDEAEYYCALWYSNHLVFGGGTKLTVLGGGGSGGGGSGGGGSEVQLVESGGGLVQPGGSLRLSCAASGFSLSRNSVHWVRQAPGKGLEWVGMIWGGGSTDYNSALKSRFTISRDNSKNTLYLQMNSLRAEDTAVYYCARNGGYDVFHYWGQGTTVTVSSTRTTTPAPRPPTPAPTIASQPLSLRPEACRPAAGGAVHTRGLDFACDIYIWAPLAGTCGVLLLSLVITLYCKRGRKKLLYIFKQPFMRPVQTTQEEDGCSCRFPEEEEGGCELRVKFSRSADAPAYQQGQNQLYNELNLGRREEYDVLDKRRGRDPEMGGKPRRKNPQEGLYNELQKDKMAEAYSEIGMKGERRRGKGHDGLYQGLSTATKDTYDALHMQALPPRSSGSGEGRGSLLTCGDVEENPGPHMTEYKPTVRLATRDDVPRAVRTLAAAFADYPATRHTVDPDRHIERVTELQELFLTRVGLDIGKVWVADDGAAVAVWTTPESVEAGAVFAEIGPRMAELSGSRLAAQQQMEGLLAPHRPKEPAWFLATVGVSPDHQGKGLGSAVVLPGVEAAERAGVPAFLETSAPRNLPFYERLGFTVTADVEVPEGPRTWCMTRKPGA

SEQ ID NO: 8439 - protein, 710 aa, Artificial Sequence
  Synthetic Polypeptide
MALPVTALLLPLALLLHAARPQAVVTQESALTTSPGETVTLTCRSSTGAVTTSNYANWVQEKPDHLFTGLIGGTNNRAPGVPARFSGSLIGDKAALTITGAQTEDEAIYFCALWYSNHLVFGGGTKLTVLGGGGSGGGGSGGGGSEVKLQESGPGLVAPSQSLSFTCTVSGFSLSRNSVHWVRQPPGKGLEWLGMIWGGGSTDYNSALKSRLNISKDSSKSQVFLKMNSLQTDDTAMYFCARNGGYDVFHYWGQGTTVTVSSTRTTTPAPRPPTPAPTIASQPLSLRPEACRPAAGGAVHTRGLDFACDIYIWAPLAGTCGVLLLSLVITLYCKRGRKKLLYIFKQPFMRPVQTTQEEDGCSCRFPEEEEGGCELRVKFSRSADAPAYQQGQNQLYNELNLGRREEYDVLDKRRGRDPEMGGKPRRKNPQEGLYNELQKDKMAEAYSEIGMKGERRRGKGHDGLYQGLSTATKDTYDALHMQALPPRSSGSGEGRGSLLTCGDVEENPGPHMTEYKPTVRLATRDDVPRAVRTLAAAFADYPATRHTVDPDRHIERVTELQELFLTRVGLDIGKVWVADDGAAVAVWTTPESVEAGAVFAEIGPRMAELSGSRLAAQQQMEGLLAPHRPKEPAWFLATVGVSPDHQGKGLGSAVVLPGVEAAERAGVPAFLETSAPRNLPFYERLGFTVTADVEVPEGPRTWCMTRKPGA

SEQ ID NO: 8440 - protein, 109 aa, Artificial Sequence
  Synthetic Polypeptide
QAVVTQEPSLTVSPGGTVTLTCRSSTGAVTTSNYANWVQQKPGQAPRGLIGGTNKRAPWTPARFSGSLLGGKAALTLSGVQPEDEAEYYCALWYSNHLVFGGGTKLTVL

SEQ ID NO: 8441 - protein, 117 aa, Artificial Sequence
  Synthetic Polypeptide
EVQLVESGGGLVQPGGSLRLSCAASGFSLSRNSVHWVRQAPGKGLEWVGMIWGGGSTDYNSALKSRFTISRDNSKNTLYLQMNSLRAEDTAVYYCARNGGYDVFHYWGQGTTVTVSS

SEQ ID NO: 8442 - protein, 241 aa, Artificial Sequence
  Synthetic Polypeptide
QAVVTQEPSLTVSPGGTVTLTCRSSTGAVTTSNYANWVQQKPGQAPRGLIGGTNKRAPWTPARFSGSLLGGKAALTLSGVQPEDEAEYYCALWYSNHLVFGGGTKLTVLGGGGSGGGGSGGGGSEVQLVESGGGLVQPGGSLRLSCAASGFSLSRNSVHWVRQAPGKGLEWVGMIWGGGSTDYNSALKSRFTISRDNSKNTLYLQMNSLRAEDTAVYYCARNGGYDVFHYWGQGTTVTVSS

SEQ ID NO: 8443 - protein, 109 aa, Artificial Sequence
  Synthetic Polypeptide
QAVVTQESALTTSPGETVTLTCRSSTGAVTTSNYANWVQEKPDHLFTGLIGGTNNRAPGVPARFSGSLIGDKAALTITGAQTEDEAIYFCALWYSNHLVFGGGTKLTVL

SEQ ID NO: 8444 - protein, 117 aa, Artificial Sequence
  Synthetic Polypeptide
EVKLQESGPGLVAPSQSLSFTCTVSGFSLSRNSVHWVRQPPGKGLEWLGMIWGGGSTDYNSALKSRLNISKDSSKSQVFLKMNSLQTDDTAMYFCARNGGYDVFHYWGQGTTVTVSS

SEQ ID NO: 8445 - protein, 241 aa, Artificial Sequence
  Synthetic Polypeptide
QAVVTQESALTTSPGETVTLTCRSSTGAVTTSNYANWVQEKPDHLFTGLIGGTNNRAPGVPARFSGSLIGDKAALTITGAQTEDEAIYFCALWYSNHLVFGGGTKLTVLGGGGSGGGGSGGGGSEVKLQESGPGLVAPSQSLSFTCTVSGFSLSRNSVHWVRQPPGKGLEWLGMIWGGGSTDYNSALKSRLNISKDSSKSQVFLKMNSLQTDDTAMYFCARNGGYDVFHYWGQGTTVTVSS

SEQ ID NO: 8446 - protein, 494 aa, Artificial Sequence
  Synthetic Polypeptide
MALPVTALLLPLALLLHAARPQAVVTQEPSLTVSPGGTVTLTCRSSTGAVTTSNYANWVQQKPGQAPRGLIGGTNKRAPWTPARFSGSLLGGKAALTLSGVQPEDEAEYYCALWYSNHLVFGGGTKLTVLGGGGSGGGGSGGGGSEVQLVESGGGLVQPGGSLRLSCAASGFSLSRNSVHWVRQAPGKGLEWVGMIWGGGSTDYNSALKSRFTISRDNSKNTLYLQMNSLRAEDTAVYYCARNGGYDVFHYWGQGTTVTVSSTREQKLISEEDLKIEVMYPPPYLDNEKSNGTIIHVKGKHLCPSPLFPGPSKPFWVLVVVGGVLACYSLLVTVAFIIFWVRSKRSRLLHSDYMNMTPRRPGPTRKHYQPYAPPRDFAAYRSRVKFSRSADAPAYQQGQNQLYNELNLGRREEYDVLDKRRGRDPEMGGKPRRKNPQEGLYNELQKDKMAEAYSEIGMKGERRRGKGHDGLYQGLSTATKDTYDALHMQALPPR

SEQ ID NO: 8447 - protein, 500 aa, Artificial Sequence
  Synthetic Polypeptide
MALPVTALLLPLALLLHAARPQAVVTQEPSLTVSPGGTVTLTCRSSTGAVTTSNYANWVQQKPGQAPRGLIGGTNKRAPWTPARFSGSLLGGKAALTLSGVQPEDEAEYYCALWYSNHLVFGGGTKLTVLGGGGSGGGGSGGGGSEVQLVESGGGLVQPGGSLRLSCAASGFSLSRNSVHWVRQAPGKGLEWVGMIWGGGSTDYNSALKSRFTISRDNSKNTLYLQMNSLRAEDTAVYYCARNGGYDVFHYWGQGTTVTVSSTREQKLISEEDLAKPTTTPAPRPPTPAPTIASQPLSLRPEACRPAAGGAVHTRGLDFACDIYIWAPLAGTCGVLLLSLVITLYCKRGRKKLLYIFKQPFMRPVQTTQEEDGCSCRFPEEEEGGCELRVKFSRSADAPAYQQGQNQLYNELNLGRREEYDVLDKRRGRDPEMGGKPRRKNPQEGLYNELQKDKMAEAYSEIGMKGERRRGKGHDGLYQGLSTATKDTYDALHMQALPPR

SEQ ID NO: 8448 - protein, 500 aa, Artificial Sequence
  Synthetic Polypeptide
MALPVTALLLPLALLLHAARPEVQLVESGGGLVQPGGSLRLSCAASGFSLSRNSVHWVRQAPGKGLEWVGMIWGGGSTDYNSALKSRFTISRDNSKNTLYLQMNSLRAEDTAVYYCARNGGYDVFHYWGQGTTVTVSSGGGGSGGGGSGGGGSQAVVTQEPSLTVSPGGTVTLTCRSSTGAVTTSNYANWVQQKPGQAPRGLIGGTNKRAPWTPARFSGSLLGGKAALTLSGVQPEDEAEYYCALWYSNHLVFGGGTKLTVLTREQKLISEEDLAKPTTTPAPRPPTPAPTIASQPLSLRPEACRPAAGGAVHTRGLDFACDIYIWAPLAGTCGVLLLSLVITLYCKRGRKKLLYIFKQPFMRPVQTTQEEDGCSCRFPEEEEGGCELRVKFSRSADAPAYQQGQNQLYNELNLGRREEYDVLDKRRGRDPEMGGKPRRKNPQEGLYNELQKDKMAEAYSEIGMKGERRRGKGHDGLYQGLSTATKDTYDALHMQALPPR

SEQ ID NO: 8449 - protein, 913 aa, Artificial Sequence
  Synthetic Polypeptide
MALPVTALLLPLALLLHAARPQAVVTQEPSLTVSPGGTVTLTCRSSTGAVTTSNYANWVQQKPGQAPRGLIGGTNKRAPWTPARFSGSLLGGKAALTLSGVQPEDEAEYYCALWYSNHLVFGGGTKLTVLGGGGSGGGGSGGGGSEVQLVESGGGLVQPGGSLRLSCAASGFSLSRNSVHWVRQAPGKGLEWVGMIWGGGSTDYNSALKSRFTISRDNSKNTLYLQMNSLRAEDTAVYYCARNGGYDVFHYWGQGTTVTVSSTREQKLISEEDLAKPTTTPAPRPPTPAPTIASQPLSLRPEACRPAAGGAVHTRGLDFACDIYIWAPLAGTCGVLLLSLVITLYCGRARVKFSRSADAPAYQQGQNQLYNELNLGRREEYDVLDKRRGRDPEMGGKPRRKNPQEGLYNELQKDKMAEAYSEIGMKGERRRGKGHDGLYQGLSTATKDTYDALHMQALPPRSRGSGATNFSLLKQAGDVEENPGPGIHMATYEVLCEVARKLGTDDREVVLFLLNVFIPQPTLAQLIGALRALKEEGRLTFPLLAECLFRAGRRDLLRDLLHLDPRFLERHLAGTMSYFSPYQLTVLHVDGELCARDIRSLIFLSKDTIGSRSTPQTFLHWVYCMENLDLLGPTDVDALMSMLRSLSRVDLQRQVQTLMGLHLSGPSHSQHYRHTPLETDFYDYKDDDDKTSGSGEGRGSLLTCGDVEENPGPHMTEYKPTVRLATRDDVPRAVRTLAAAFADYPATRHTVDPDRHIERVTELQELFLTRVGLDIGKVWVADDGAAVAVWTTPESVEAGAVFAEIGPRMAELSGSRLAAQQQMEGLLAPHRPKEPAWFLATVGVSPDHQGKGLGSAVVLPGVEAAERAGVPAFLETSAPRNLPFYERLGFTVTADVEVPEGPRTWCMTRKPGA

SEQ ID NO: 8450 - protein, 853 aa, Artificial Sequence
  Synthetic Polypeptide
MALPVTALLLPLALLLHAARPQAVVTQEPSLTVSPGGTVTLTCRSSTGAVTTSNYANWVQQKPGQAPRGLIGGTNKRAPWTPARFSGSLLGGKAALTLSGVQPEDEAEYYCALWYSNHLVFGGGTKLTVLLEIQNPDPAVYQLRDSKSSDKSVCLFTDFDSQTNVSQSKDSDVYITDKCVLDMRSMDFKSNSAVAWSNKSDFACANAFNNSIIPEDTFFPSSDVPCDVKLVEKSFETDTNLNFQNLSVIGFRILLLKVAGFNLLMTLRLWSSRAKRSGSGVKQTLNFDLLKLAGDVESNPGPTSMDWIWRILFLVGAATGAHSFEEVQLVESGGGLVQPGGSLRLSCAASGFSLSRNSVHWVRQAPGKGLEWVGMIWGGGSTDYNSALKSRFTISRDNSKNTLYLQMNSLRAEDTAVYYCARNGGYDVFHYWGQGTTVTVSSTREDLKNVFPPEVAVFEPSKAEIAHTQKATLVCLATGFYPDHVELSWWVNGKEVHSGVCTDPQPLKEQPALNDSRYCLSSRLRVSATFWQNPRNHFRCQVQFYGLSENDEWTQDRAKPVTQIVSAEAWGRADCGITSASYHQGVLSATILYEILLGKATLYAVLVSALVLMAMVKRKDSRGRAKRSGSGATNFSLLKQAGDVEENPGPSRGHMTEYKPTVRLATRDDVPRAVRTLAAAFADYPATRHTVDPDRHIERVTELQELFLTRVGLDIGKVWVADDGAAVAVWTTPESVEAGAVFAEIGPRMAELSGSRLAAQQQMEGLLAPHRPKEPAWFLATVGVSPDHQGKGLGSAVVLPGVEAAERAGVPAFLETSAPRNLPFYERLGFTVTADVEVPEGPRTWCMTRKPGA

SEQ ID NO: 8451 - protein, 852 aa, Artificial Sequence
  Synthetic Polypeptide
MALPVTALLLPLALLLHAARPQAVVTQEPSLTVSPGGTVTLTCRSSTGAVTTSNYANWVQQKPGQAPRGLIGGTNKRAPWTPARFSGSLLGGKAALTLSGVQPEDEAEYYCALWYSNHLVFGGGTKLTVLLEDLKNVFPPEVAVFEPSKAEIAHTQKATLVCLATGFYPDHVELSWWVNGKEVHSGVCTDPQPLKEQPALNDSRYCLSSRLRVSATFWQNPRNHFRCQVQFYGLSENDEWTQDRAKPVTQIVSAEAWGRADCGITSASYHQGVLSATILYEILLGKATLYAVLVSALVLMAMVKRKDSRGRAKRSGSGATNFSLLKQAGDVEENPGPTSMDWIWRILFLVGAATGAHSFEEVQLVESGGGLVQPGGSLRLSCAASGFSLSRNSVHWVRQAPGKGLEWVGMIWGGGSTDYNSALKSRFTISRDNSKNTLYLQMNSLRAEDTAVYYCARNGGYDVFHYWGQGTTVTVSSTRIQNPDPAVYQLRDSKSSDKSVCLFTDFDSQTNVSQSKDSDVYITDKCVLDMRSMDFKSNSAVAWSNKSDFACANAFNNSIIPEDTFFPSSDVPCDVKLVEKSFETDTNLNFQNLSVIGFRILLLKVAGFNLLMTLRLWSSRAKRSGSGVKQTLNFDLLKLAGDVESNPGPSRGHMTEYKPTVRLATRDDVPRAVRTLAAAFADYPATRHTVDPDRHIERVTELQELFLTRVGLDIGKVWVADDGAAVAVWTTPESVEAGAVFAEIGPRMAELSGSRLAAQQQMEGLLAPHRPKEPAWFLATVGVSPDHQGKGLGSAVVLPGVEAAERAGVPAFLETSAPRNLPFYERLGFTVTADVEVPEGPRTWCMTRKPGA

SEQ ID NO: 8452 - protein, 619 aa, Artificial Sequence
  Synthetic Polypeptide
MALPVTALLLPLALLLHAARPQAVVTQEPSLTVSPGGTVTLTCRSSTGAVTTSNYANWVQQKPGQAPRGLIGGTNKRAPWTPARFSGSLLGGKAALTLSGVQPEDEAEYYCALWYSNHLVFGGGTKLTVLLEDLKNVFPPEVAVFEPSEAEISHTQKATLVCLATGFYPDHVELSWWVNGKEVHSGVCTDPQPLKEQPALNDSRYCLSSRLRVSATFWQNPRNHFRCQVQFYGLSENDEWTQDRAKPVTQIVSAEAWGRADCGFTSESYQQGVLSATILYEILLGKATLYAVLVSALVLMAMVKRKDSRGRAKRSGSGATNFSLLKQAGDVEENPGPTSMDWIWRILFLVGAATGAHSFEEVQLVESGGGLVQPGGSLRLSCAASGFSLSRNSVHWVRQAPGKGLEWVGMIWGGGSTDYNSALKSRFTISRDNSKNTLYLQMNSLRAEDTAVYYCARNGGYDVFHYWGQGTTVTVSSTRIQNPDPAVYQLRDSKSSDKSVCLFTDFDSQTNVSQSKDSDVYITDKCVLDMRSMDFKSNSAVAWSNKSDFACANAFNNSIIPEDTFFPSPESSCDVKLVEKSFETDTNLNFQNLSVIGFRILLLKVAGFNLLMTLRLWSS

SEQ ID NO: 8453 - protein, 844 aa, Artificial Sequence
  Synthetic Polypeptide
MALPVTALLLPLALLLHAARPQAVVTQEPSLTVSPGGTVTLTCRSSTGAVTTSNYANWVQQKPGQAPRGLIGGTNKRAPWTPARFSGSLLGGKAALTLSGVQPEDEAEYYCALWYSNHLVFGGGTKLTVLLEDLKNVFPPEVAVFEPSEAEISHTQKATLVCLATGFYPDHVELSWWVNGKEVHSGVCTDPQPLKEQPALNDSRYCLSSRLRVSATFWQNPRNHFRCQVQFYGLSENDEWTQDRAKPVTQIVSAEAWGRADCGFTSESYQQGVLSATILYEILLGKATLYAVLVSALVLMAMVKRKDSRGRAKRSGSGATNFSLLKQAGDVEENPGPTSMDWIWRILFLVGAATGAHSFEEVQLVESGGGLVQPGGSLRLSCAASGFSLSRNSVHWVRQAPGKGLEWVGMIWGGGSTDYNSALKSRFTISRDNSKNTLYLQMNSLRAEDTAVYYCARNGGYDVFHYWGQGTTVTVSSTRIQNPDPAVYQLRDSKSSDKSVCLFTDFDSQTNVSQSKDSDVYITDKCVLDMRSMDFKSNSAVAWSNKSDFACANAFNNSIIPEDTFFPSPESSCDVKLVEKSFETDTNLNFQNLSVIGFRILLLKVAGFNLLMTLRLWSSRAKRSGSGVKQTLNFDLLKLAGDVESNPGPSRGGIHTMATYEVLCEVARKLGTDDREVVLFLLNVFIPQPTLAQLIGALRALKEEGRLTFPLLAECLFRAGRRDLLRDLLHLDPRFLERHLAGTMSYFSPYQLTVLHVDGELCARDIRSLIFLSKDTIGSRSTPQTFLHWVYCMENLDLLGPTDVDALMSMLRSLSRVDLQRQVQTLMGLHLSGPSHSQHYRHTP

SEQ ID NO: 8454 - protein, 623 aa, Artificial Sequence
  Synthetic Polypeptide
MALPVTALLLPLALLLHAARPQAVVTQEPSLTVSPGGTVTLTCRSSTGAVTTSNYANWVQQKPGQAPRGLIGGTNKRAPWTPARFSGSLLGGKAALTLSGVQPEDEAEYYCALWYSNHLVFGGGTKLTVLLEIQNPDPAVYQLRDSKSSDKSVCLFTDFDSQTNVSQSKDSDVYITDKCVLDMRSMDFKSNSAVAWSNKSDFACANAFNNSIIPEDTFFPSPESSCDVKLVEKSFETDTNLNFQNLSVIGFRILLLKVAGFNLLMTLRLWSSRAKRSGSGVKQTLNFDLLKLAGDVESNPGPTSMDWIWRILFLVGAATGAHSFEEVQLVESGGGLVQPGGSLRLSCAASGFSLSRNSVHWVRQAPGKGLEWVGMIWGGGSTDYNSALKSRFTISRDNSKNTLYLQMNSLRAEDTAVYYCARNGGYDVFHYWGQGTTVTVSSTREDLKNVFPPEVAVFEPSEAEISHTQKATLVCLATGFYPDHVELSWWVNGKEVHSGVCTDPQPLKEQPALNDSRYCLSSRLRVSATFWQNPRNHFRCQVQFYGLSENDEWTQDRAKPVTQIVSAEAWGRADCGFTSESYQQGVLSATILYEILLGKATLYAVLVSALVLMAMVKRKDSRG

SEQ ID NO: 8455 - protein, 845 aa, Artificial Sequence
  Synthetic Polypeptide
MALPVTALLLPLALLLHAARPQAVVTQEPSLTVSPGGTVTLTCRSSTGAVTTSNYANWVQQKPGQAPRGLIGGTNKRAPWTPARFSGSLLGGKAALTLSGVQPEDEAEYYCALWYSNHLVFGGGTKLTVLLEIQNPDPAVYQLRDSKSSDKSVCLFTDFDSQTNVSQSKDSDVYITDKCVLDMRSMDFKSNSAVAWSNKSDFACANAFNNSIIPEDTFFPSPESSCDVKLVEKSFETDTNLNFQNLSVIGFRILLLKVAGFNLLMTLRLWSSRAKRSGSGVKQTLNFDLLKLAGDVESNPGPTSMDWIWRILFLVGAATGAHSFEEVQLVESGGGLVQPGGSLRLSCAASGFSLSRNSVHWVRQAPGKGLEWVGMIWGGGSTDYNSALKSRFTISRDNSKNTLYLQMNSLRAEDTAVYYCARNGGYDVFHYWGQGTTVTVSSTREDLKNVFPPEVAVFEPSEAEISHTQKATLVCLATGFYPDHVELSWWVNGKEVHSGVCTDPQPLKEQPALNDSRYCLSSRLRVSATFWQNPRNHFRCQVQFYGLSENDEWTQDRAKPVTQIVSAEAWGRADCGFTSESYQQGVLSATILYEILLGKATLYAVLVSALVLMAMVKRKDSRGRAKRSGSGATNFSLLKQAGDVEENPGPSRGGIHTMATYEVLCEVARKLGTDDREVVLFLLNVFIPQPTLAQLIGALRALKEEGRLTFPLLAECLFRAGRRDLLRDLLHLDPRFLERHLAGTMSYFSPYQLTVLHVDGELCARDIRSLIFLSKDTIGSRSTPQTFLHWVYCMENLDLLGPTDVDALMSMLRSLSRVDLQRQVQTLMGLHLSGPSHSQHYRHTP

SEQ ID NO: 8456 - protein, 897 aa, Artificial Sequence
  Synthetic Polypeptide
MALPVTALLLPLALLLHAARPLEGKPIPNPLLGLDSTGSGEDLKNVFPPEVAVFEPSKAEIAHTQKATLVCLATGFYPDHVELSWWVNGKEVHSGVCTDPQPLKEQPALNDSRYCLSSRLRVSATFWQNPRNHFRCQVQFYGLSENDEWTQDRAKPVTQIVSAEAWGRADCGITSASYHQGVLSATILYEILLGKATLYAVLVSALVLMAMVKRKDSRGRAKRSGSGATNFSLLKQAGDVEENPGPTSMALPVTALLLPLALLLHAARPQAVVTQEPSLTVSPGGTVTLTCRSSTGAVTTSNYANWVQQKPGQAPRGLIGGTNKRAPWTPARFSGSLLGGKAALTLSGVQPEDEAEYYCALWYSNHLVFGGGTKLTVLGGGGSGGGGSGGGGSEVQLVESGGGLVQPGGSLRLSCAASGFSLSRNSVHWVRQAPGKGLEWVGMIWGGGSTDYNSALKSRFTISRDNSKNTLYLQMNSLRAEDTAVYYCARNGGYDVFHYWGQGTTVTVSSTREQKLISEEDGSGIQNPDPAVYQLRDSKSSDKSVCLFTDFDSQTNVSQSKDSDVYITDKCVLDMRSMDFKSNSAVAWSNKSDFACANAFNNSIIPEDTFFPSSDVPCDVKLVEKSFETDTNLNFQNLSVIGFRILLLKVAGFNLLMTLRLWSSRAKRSGSGVKQTLNFDLLKLAGDVESNPGPSRGHMTEYKPTVRLATRDDVPRAVRTLAAAFADYPATRHTVDPDRHIERVTELQELFLTRVGLDIGKVWVADDGAAVAVWTTPESVEAGAVFAEIGPRMAELSGSRLAAQQQMEGLLAPHRPKEPAWFLATVGVSPDHQGKGLGSAVVLPGVEAAERAGVPAFLETSAPRNLPFYERLGFTVTADVEVPEGPRTWCMTRKPGA

SEQ ID NO: 8457 - protein, 898 aa, Artificial Sequence
  Synthetic Polypeptide
MALPVTALLLPLALLLHAARPLEQKLISEEDLGSGDRPDPAVYQLRDSKSSDKSVCLFTDFDSQTNVSQSKDSDVYITDKCVLDMRSMDFKSNSAVAWSNKSDFACANAFNNSIIPEDTFFPSPESSCDVKLVEKSFETDTNLNFQNLSVIGFRILLLKVAGFNLLMTLRLWSSSSRAKRSGSGVKQTLNFDLLKLAGDVESNPGPTSMALPVTALLLPLALLLHAARPQAVVTQEPSLTVSPGGTVTLTCRSSTGAVTTSNYANWVQQKPGQAPRGLIGGTNKRAPWTPARFSGSLLGGKAALTLSGVQPEDEAEYYCALWYSNHLVFGGGTKLTVLGGGGSGGGGSGGGGSEVQLVESGGGLVQPGGSLRLSCAASGFSLSRNSVHWVRQAPGKGLEWVGMIWGGGSTDYNSALKSRFTISRDNSKNTLYLQMNSLRAEDTAVYYCARNGGYDVFHYWGQGTTVTVSSTRGKPIPNPLLGLDSTGSGEDLKNVFPPEVAVFEPSEAEISHTQKATLVCLATGFYPDHVELSWWVNGKEVHSGVCTDPQPLKEQPALNDSRYCLSSRLRVSATFWQNPRNHFRCQVQFYGLSENDEWTQDRAKPVTQIVSAEAWGRADCGFTSESYQQGVLSATILYEILLGKATLYAVLVSALVLMAMVKRKDSRGRAKRSGSGATNFSLLKQAGDVEENPGPSRGHMTEYKPTVRLATRDDVPRAVRTLAAAFADYPATRHTVDPDRHIERVTELQELFLTRVGLDIGKVWVADDGAAVAVWTTPESVEAGAVFAEIGPRMAELSGSRLAAQQQMEGLLAPHRPKEPAWFLATVGVSPDHQGKGLGSAVVLPGVEAAERAGVPAFLETSAPRNLPFYERLGFTVTADVEVPEGPRTWCMTRKPGA

SEQ ID NO: 8458 - protein, 852 aa, Artificial Sequence
  Synthetic Polypeptide
MALPVTALLLPLALLLHAARPQAVVTQEPSLTVSPGGTVTLTCRSSTGAVTTSNYANWVQQKPGQAPRGLIGGTNKRAPWTPARFSGSLLGGKAALTLSGVQPEDEAEYYCALWYSNHLVFGGGTKLTVLLEDLKNVFPPEVAVFEPSEAEISHTQKATLVCLATGFYPDHVELSWWVNGKEVHSGVSTDPQPLKEQPALNDSRYCLSSRLRVSATFWQNPRNHFRCQVQFYGLSENDEWTQDRAKPVTQIVSAEAWGRADCGFTSESYQQGVLSATILYEILLGKATLYAVLVSALVLMAMVKRKDSRGRAKRSGSGATNFSLLKQAGDVEENPGPTSMDWIWRILFLVGAATGAHSFEEVQLVESGGGLVQPGGSLRLSCAASGFSLSRNSVHWVRQAPGKGLEWVGMIWGGGSTDYNSALKSRFTISRDNSKNTLYLQMNSLRAEDTAVYYCARNGGYDVFHYWGQGTTVTVSSTRIQNPDPAVYQLRDSKSSDKSVCLFTDFDSQTNVSQSKDSDVYITDKTVLDMRSMDFKSNSAVAWSNKSDFACANAFNNSIIPEDTFFPSPESSCDVKLVEKSFETDTNLNFQNLSVIGFRILLLKVAGFNLLMTLRLWSSRAKRSGSGVKQTLNFDLLKLAGDVESNPGPSRGHMTEYKPTVRLATRDDVPRAVRTLAAAFADYPATRHTVDPDRHIERVTELQELFLTRVGLDIGKVWVADDGAAVAVWTTPESVEAGAVFAEIGPRMAELSGSRLAAQQQMEGLLAPHRPKEPAWFLATVGVSPDHQGKGLGSAVVLPGVEAAERAGVPAFLETSAPRNLPFYERLGFTVTADVEVPEGPRTWCMTRKPGA

SEQ ID NO: 8459 - protein, 934 aa, Artificial Sequence
  Synthetic Polypeptide
MALPVTALLLPLALLLHAARPQAVVTQEPSLTVSPGGTVTLTCRSSTGAVTTSNYANWVQQKPGQAPRGLIGGTNKRAPWTPARFSGSLLGGKAALTLSGVQPEDEAEYYCALWYSNHLVFGGGTKLTVLLEDLKNVFPPEVAVFEPSEAEISHTQKATLVCLATGFYPDHVELSWWVNGKEVHSGVSTDPQPLKEQPALNDSRYCLSSRLRVSATFWQNPRNHFRCQVQFYGLSENDEWTQDRAKPVTQIVSAEAWGRADCGFTSESYQQGVLSATILYEILLGKATLYAVLVSALVLMAMVKRKDSRGRAKRSGSGATNFSLLKQAGDVEENPGPTSMDWIWRILFLVGAATGAHSFEEVQLVESGGGLVQPGGSLRLSCAASGFSLSRNSVHWVRQAPGKGLEWVGMIWGGGSTDYNSALKSRFTISRDNSKNTLYLQMNSLRAEDTAVYYCARNGGYDVFHYWGQGTTVTVSSTREQKLISEEDGSGTPFPSLAPPIMLLVDGKQQMVVVCLVLDVAPPGLDSPIWFSAGNGSALDAFTYGPSPATDGTWTNLAHLSLPSEELASWEPLVCHTGPGAEGHSRSTQPMHLSGEASTARTCPQEPLRGTPGGALWLGVLRLLLFKLLLFDLLLTCSCLCDPAGPLPSPATTTRLRALGSHRLHPATETGGREATSSPRPQPRDRRWGDTPPGRKPGSPVRAKRSGSGVKQTLNFDLLKLAGDVESNPGPSRGHMTEYKPTVRLATRDDVPRAVRTLAAAFADYPATRHTVDPDRHIERVTELQELFLTRVGLDIGKVWVADDGAAVAVWTTPESVEAGAVFAEIGPRMAELSGSRLAAQQQMEGLLAPHRPKEPAWFLATVGVSPDHQGKGLGSAVVLPGVEAAERAGVPAFLETSAPRNLPFYERLGFTVTADVEVPEGPRTWCMTRKPGA

SEQ ID NO: 8460 - protein, 952 aa, Artificial Sequence
  Synthetic Polypeptide
MALPVTALLLPLALLLHAARPLEDLKNVFPPEVAVFEPSEAEISHTQKATLVCLATGFYPDHVELSWWVNGKEVHSGVSTDPQPLKEQPALNDSRYCLSSRLRVSATFWQNPRNHFRCQVQFYGLSENDEWTQDRAKPVTQIVSAEAWGRADCGFTSESYQQGVLSATILYEILLGKATLYAVLVSALVLMAMVKRKDSRGRAKRSGSGATNFSLLKQAGDVEENPGPTSMALPVTALLLPLALLLHAARPQAVVTQEPSLTVSPGGTVTLTCRSSTGAVTTSNYANWVQQKPGQAPRGLIGGTNKRAPWTPARFSGSLLGGKAALTLSGVQPEDEAEYYCALWYSNHLVFGGGTKLTVLGGGGSGGGGSGGGGSEVQLVESGGGLVQPGGSLRLSCAASGFSLSRNSVHWVRQAPGKGLEWVGMIWGGGSTDYNSALKSRFTISRDNSKNTLYLQMNSLRAEDTAVYYCARNGGYDVFHYWGQGTTVTVSSTREQKLISEEDLGSGTPFPSLAPPIMLLVDGKQQMVVVCLVLDVAPPGLDSPIWFSAGNGSALDAFTYGPSPATDGTWTNLAHLSLPSEELASWEPLVCHTGPGAEGHSRSTQPMHLSGEASTARTCPQEPLRGTPGGALWLGVLRLLLFKLLLFDLLLTCSCLCDPAGPLPSPATTTRLRALGSHRLHPATETGGREATSSPRPQPRDRRWGDTPPGRKPGSPVRAKRSGSGVKQTLNFDLLKLAGDVESNPGPSRSRGHMTEYKPTVRLATRDDVPRAVRTLAAAFADYPATRHTVDPDRHIERVTELQELFLTRVGLDIGKVWVADDGAAVAVWTTPESVEAGAVFAEIGPRMAELSGSRLAAQQQMEGLLAPHRPKEPAWFLATVGVSPDHQGKGLGSAVVLPGVEAAERAGVPAFLETSAPRNLPFYERLGFTVTADVEVPEGPRTWCMTRKPGA

SEQ ID NO: 8461 - protein, 889 aa, Artificial Sequence
  Synthetic Polypeptide
MALPVTALLLPLALLLHAARPQAVVTQEPSLTVSPGGTVTLTCRSSTGAVTTSNYANWVQQKPGQAPRGLIGGTNKRAPWTPARFSGSLLGGKAALTLSGVQPEDEAEYYCALWYSNHLVFGGGTKLTVLLEGKPIPNPLLGLDSTGSGDKQLDADVSPKPTIFLPSIAETKLQKAGTYLCLLEKFFPDVIKIHWQEKKSNTILGSQEGNTMKTNDTYMKFSWLTVPEKSLDKEHRCIVRHENNKNGVDQEIIFPPIKTDVITMDPKDNCSKDANDTLLLQLTNTSAYYMYLLLLLKSVVYFAIITCCLLRRTAFCCNGEKSRAKRSGSGATNFSLLKQAGDVEENPGPTSMDWIWRILFLVGAATGAHSFEEVQLVESGGGLVQPGGSLRLSCAASGFSLSRNSVHWVRQAPGKGLEWVGMIWGGGSTDYNSALKSRFTISRDNSKNTLYLQMNSLRAEDTAVYYCARNGGYDVFHYWGQGTTVTVSSTREQKLISEEDGSGSQPHTKPSVFVMKNGTNVACLVKEFYPKDIRINLVSSKKITEFDPAIVISPSGKYNAVKLGKYEDSNSVTCSVQHDNKTVHSTDFEVKTDSTDHVKPKETENTKQPSKSCHKPKAIVHTEKVNMMSLTVLGLRMLFAKTVAVNFLLTAKLFFLRAKRSGSGVKQTLNFDLLKLAGDVESNPGPSRGHMTEYKPTVRLATRDDVPRAVRTLAAAFADYPATRHTVDPDRHIERVTELQELFLTRVGLDIGKVWVADDGAAVAVWTTPESVEAGAVFAEIGPRMAELSGSRLAAQQQMEGLLAPHRPKEPAWFLATVGVSPDHQGKGLGSAVVLPGVEAAERAGVPAFLETSAPRNLPFYERLGFTVTADVEVPEGPRTWCMTRKPGA

SEQ ID NO: 8462 - protein, 627 aa, Artificial Sequence
  Synthetic Polypeptide
MALPVTALLLPLALLLHAARPQAVVTQEPSLTVSPGGTVTLTCRSSTGAVTTSNYANWVQQKPGQAPRGLIGGTNKRAPWTPARFSGSLLGGKAALTLSGVQPEDEAEYYCALWYSNHLVFGGGTKLTVLLESQPHTKPSVFVMKNGTNVACLVKEFYPKDIRINLVSSKKITEFDPAIVISPSGKYNAVKLGKYEDSNSVTCSVQHDNKTVHSTDFEVKTDSTDHVKPKETENTKQPSKSCHKPKAIVHTEKVNMMSLTVLGLRMLFAKTVAVNFLLTAKLFFLRAKRSGSGATNFSLLKQAGDVEENPGPTSMDWIWRILFLVGAATGAHSFEEVQLVESGGGLVQPGGSLRLSCAASGFSLSRNSVHWVRQAPGKGLEWVGMIWGGGSTDYNSALKSRFTISRDNSKNTLYLQMNSLRAEDTAVYYCARNGGYDVFHYWGQGTTVTVSSTRDKQLDADVSPKPTIFLPSIAETKLQKAGTYLCLLEKFFPDVIKIHWQEKKSNTILGSQEGNTMKTNDTYMKFSWLTVPEKSLDKEHRCIVRHENNKNGVDQEIIFPPIKTDVITMDPKDNCSKDANDTLLLQLTNTSAYYMYLLLLLKSVVYFAIITCCLLRRTAFCCNGEKS

SEQ ID NO: 8463 - protein, 904 aa, Artificial Sequence
  Synthetic Polypeptide
MALPVTALLLPLALLLHAARPLEGKPIPNPLLGLDSTGSGDKQLDADVSPKPTIFLPSIAETKLQKAGTYLCLLEKFFPDVIKIHWQEKKSNTILGSQEGNTMKTNDTYMKFSWLTVPEKSLDKEHRCIVRHENNKNGVDQEIIFPPIKTDVITMDPKDNCSKDANDTLLLQLTNTSAYYMYLLLLLKSVVYFAIITCCLLRRTAFCCNGEKSRAKRSGSGATNFSLLKQAGDVEENPGPTSMALPVTALLLPLALLLHAARPQAVVTQEPSLTVSPGGTVTLTCRSSTGAVTTSNYANWVQQKPGQAPRGLIGGTNKRAPWTPARFSGSLLGGKAALTLSGVQPEDEAEYYCALWYSNHLVFGGGTKLTVLGGGGSGGGGSGGGGSEVQLVESGGGLVQPGGSLRLSCAASGFSLSRNSVHWVRQAPGKGLEWVGMIWGGGSTDYNSALKSRFTISRDNSKNTLYLQMNSLRAEDTAVYYCARNGGYDVFHYWGQGTTVTVSSTREQKLISEEDGSGSQPHTKPSVFVMKNGTNVACLVKEFYPKDIRINLVSSKKITEFDPAIVISPSGKYNAVKLGKYEDSNSVTCSVQHDNKTVHSTDFEVKTDSTDHVKPKETENTKQPSKSCHKPKAIVHTEKVNMMSLTVLGLRMLFAKTVAVNFLLTAKLFFLRAKRSGSGVKQTLNFDLLKLAGDVESNPGPSRGHMTEYKPTVRLATRDDVPRAVRTLAAAFADYPATRHTVDPDRHIERVTELQELFLTRVGLDIGKVWVADDGAAVAVWTTPESVEAGAVFAEIGPRMAELSGSRLAAQQQMEGLLAPHRPKEPAWFLATVGVSPDHQGKGLGSAVVLPGVEAAERAGVPAFLETSAPRNLPFYERLGFTVTADVEVPEGPRTWCMTRKPGA

SEQ ID NO: 8464 - protein, 1029 aa, Artificial Sequence
  Synthetic Polypeptide
MALPVTALLLPLALLLHAARPQAVVTQEPSLTVSPGGTVTLTCRSSTGAVTTSNYANWVQQKPGQAPRGLIGGTNKRAPWTPARFSGSLLGGKAALTLSGVQPEDEAEYYCALWYSNHLVFGGGTKLTVLGQPKANPTVTLFPPSSEELQANKATLVCLISDFYPGAVTVAWKADGSPVKAGVETTKPSKQSNNKYAASSYLSLTPEQWKSHRSYSCQVTHEGSTVEKTVAPTECSGSQSFGLLDPKLCYLLDGILFIYGVILTALFLRVKFSRSADAPAYQQGQNQLYNELNLGRREEYDVLDKRRGRDPEMGGKPQRRKNPQEGLYNELQKDKMAEAYSEIGMKGERRRGKGHDGLYQGLSTATKDTYDALHMQALPPRRAKRSGSGATNFSLLKQAGDVEENPGPTSMDWIWRILFLVGAATGAHSFEEVQLVESGGGLVQPGGSLRLSCAASGFSLSRNSVHWVRQAPGKGLEWVGMIWGGGSTDYNSALKSRFTISRDNSKNTLYLQMNSLRAEDTAVYYCARNGGYDVFHYWGQGTTVTVSSASTKGPSVFPLAPSSKSTSGGTAALGCLVKDYFPEPVTVSWNSGALTSGVHTFPAVLQSSGLYSLSSVVTVPSSSLGTQTYICNVNHKPSNTKVDKRVEPKSCGTQSFGLLDPKLCYLLDGILFIYGVILTALFLRVKFSRSADAPAYQQGQNQLYNELNLGRREEYDVLDKRRGRDPEMGGKPQRRKNPQEGLYNELQKDKMAEAYSEIGMKGERRRGKGHDGLYQGLSTATKDTYDALHMQALPPRRAKRSGSGVKQTLNFDLLKLAGDVESNPGPSRGHMTEYKPTVRLATRDDVPRAVRTLAAAFADYPATRHTVDPDRHIERVTELQELFLTRVGLDIGKVWVADDGAAVAVWTTPESVEAGAVFAEIGPRMAELSGSRLAAQQQMEGLLAPHRPKEPAWFLATVGVSPDHQGKGLGSAVVLPGVEAAERAGVPAFLETSAPRNLPFYERLGFTVTADVEVPEGPRTWCMTRKPGA

SEQ ID NO: 8465 - protein, 815 aa, Artificial Sequence
  Synthetic Polypeptide
MALPVTALLLPLALLLHAARPQAVVTQEPSLTVSPGGTVTLTCRSSTGAVTTSNYANWVQQKPGQAPRGLIGGTNKRAPWTPARFSGSLLGGKAALTLSGVQPEDEAEYYCALWYSNHLVFGGGTKLTVLLEDLKNVFPPEVAVFEPSEAEISHTQKATLVCLATGFYPDHVELSWWVNGKEVHSGVSTDPQPLKEQPALNDSRYCLSSRLRVSATFWQNPRNHFRCQVQFYGLSENDEWTQDRAKPVTQIVSAEAWGRADCGSQSFGLLDPKLCYLLDGILFIYGVILTALFLRVKFSRSADAPAYQQGQNQLYNELNLGRREEYDVLDKRRGRDPEMGGKPQRRKNPQEGLYNELQKDKMAEAYSEIGMKGERRRGKGHDGLYQGLSTATKDTYDALHMQALPPRRAKRSGSGATNFSLLKQAGDVEENPGPTSMDWIWRILFLVGAATGAHSFEEVQLVESGGGLVQPGGSLRLSCAASGFSLSRNSVHWVRQAPGKGLEWVGMIWGGGSTDYNSALKSRFTISRDNSKNTLYLQMNSLRAEDTAVYYCARNGGYDVFHYWGQGTTVTVSSTRIQNPDPAVYQLRDSKSSDKSVCLFTDFDSQTNVSQSKDSDVYITDKTVLDMRSMDFKSNSAVAWSNKSDFACANAFNNSIIPEDTFFPSPESSCGTQSFGLLDPKLCYLLDGILFIYGVILTALFLRVKFSRSADAPAYQQGQNQLYNELNLGRREEYDVLDKRRGRDPEMGGKPQRRKNPQEGLYNELQKDKMAEAYSEIGMKGERRRGKGHDGLYQGLSTATKDTYDALHMQALPPR

SEQ ID NO: 8466 - protein, 815 aa, Artificial Sequence
  Synthetic Polypeptide
MALPVTALLLPLALLLHAARPQAVVTQEPSLTVSPGGTVTLTCRSSTGAVTTSNYANWVQQKPGQAPRGLIGGTNKRAPWTPARFSGSLLGGKAALTLSGVQPEDEAEYYCALWYSNHLVFGGGTKLTVLLEDLKNVFPPEVAVFEPSKAEIAHTQKATLVCLATGFYPDHVELSWWVNGKEVHSGVCTDPQPLKEQPALNDSRYCLSSRLRVSATFWQNPRNHFRCQVQFYGLSENDEWTQDRAKPVTQIVSAEAWGRADCGSQSFGLLDPKLCYLLDGILFIYGVILTALFLRVKFSRSADAPAYQQGQNQLYNELNLGRREEYDVLDKRRGRDPEMGGKPQRRKNPQEGLYNELQKDKMAEAYSEIGMKGERRRGKGHDGLYQGLSTATKDTYDALHMQALPPRRAKRSGSGATNFSLLKQAGDVEENPGPTSMDWIWRILFLVGAATGAHSFEEVQLVESGGGLVQPGGSLRLSCAASGFSLSRNSVHWVRQAPGKGLEWVGMIWGGGSTDYNSALKSRFTISRDNSKNTLYLQMNSLRAEDTAVYYCARNGGYDVFHYWGQGTTVTVSSTRIQNPDPAVYQLRDSKSSDKSVCLFTDFDSQTNVSQSKDSDVYITDKCVLDMRSMDFKSNSAVAWSNKSDFACANAFNNSIIPEDTFFPSSDVPCGTQSFGLLDPKLCYLLDGILFIYGVILTALFLRVKFSRSADAPAYQQGQNQLYNELNLGRREEYDVLDKRRGRDPEMGGKPQRRKNPQEGLYNELQKDKMAEAYSEIGMKGERRRGKGHDGLYQGLSTATKDTYDALHMQALPPR

SEQ ID NO: 8467 - protein, 886 aa, Artificial Sequence
  Synthetic Polypeptide
MALPVTALLLPLALLLHAARPQAVVTQEPSLTVSPGGTVTLTCRSSTGAVTTSNYANWVQQKPGQAPRGLIGGTNKRAPWTPARFSGSLLGGKAALTLSGVQPEDEAEYYCALWYSNHLVFGGGTKLTVLLEGKPIPNPLLGLDSTGSGEDLKNVFPPEVAVFEPSEAEISHTQKATLVCLATGFYPDHVELSWWVNGKEVHSGVSTDPQPLKEQPALNDSRYCLSSRLRVSATFWQNPRNHFRCQVQFYGLSENDEWTQDRAKPVTQIVSAEAWGRADCGSQSFGLLDPKLCYLLDGILFIYGVILTALFLRVKFSRSADAPAYQQGQNQLYNELNLGRREEYDVLDKRRGRDPEMGGKPQRRKNPQEGLYNELQKDKMAEAYSEIGMKGERRRGKGHDGLYQGLSTATKDTYDALHMQALPPRRAKRSGSGATNFSLLKQAGDVEENPGPTSMDWIWRILFLVGAATGAHSFEEVQLVESGGGLVQPGGSLRLSCAASGFSLSRNSVHWVRQAPGKGLEWVGMIWGGGSTDYNSALKSRFTISRDNSKNTLYLQMNSLRAEDTAVYYCARNGGYDVFHYWGQGTTVTVSSTREQKLISEEDGSGIQNPDPAVYQLRDSKSSDKSVCLFTDFDSQTNVSQSKDSDVYITDKTVLDMRSMDFKSNSAVAWSNKSDFACANAFNNSIIPEDTFFPSPESSCGTQSFGLLDPKLCYLLDGILFIYGVILTALFLRSKRSRLLHSDYMNMTPRRPGPTRKHYQPYAPPRDFAAYRSRVKFSRSADAPAYQQGQNQLYNELNLGRREEYDVLDKRRGRDPEMGGKPQRRKNPQEGLYNELQKDKMAEAYSEIGMKGERRRGKGHDGLYQGLSTATKDTYDALHMQALPPR

SEQ ID NO: 8468 - protein, 927 aa, Artificial Sequence
  Synthetic Polypeptide
MALPVTALLLPLALLLHAARPQAVVTQEPSLTVSPGGTVTLTCRSSTGAVTTSNYANWVQQKPGQAPRGLIGGTNKRAPWTPARFSGSLLGGKAALTLSGVQPEDEAEYYCALWYSNHLVFGGGTKLTVLLEGKPIPNPLLGLDSTGSGEDLKNVFPPEVAVFEPSEAEISHTQKATLVCLATGFYPDHVELSWWVNGKEVHSGVSTDPQPLKEQPALNDSRYCLSSRLRVSATFWQNPRNHFRCQVQFYGLSENDEWTQDRAKPVTQIVSAEAWGRADCGSQSFGLLDPKLCYLLDGILFIYGVILTALFLRSKRSRLLHSDYMNMTPRRPGPTRKHYQPYAPPRDFAAYRSRVKFSRSADAPAYQQGQNQLYNELNLGRREEYDVLDKRRGRDPEMGGKPQRRKNPQEGLYNELQKDKMAEAYSEIGMKGERRRGKGHDGLYQGLSTATKDTYDALHMQALPPRRAKRSGSGATNFSLLKQAGDVEENPGPTSMDWIWRILFLVGAATGAHSFEEVQLVESGGGLVQPGGSLRLSCAASGFSLSRNSVHWVRQAPGKGLEWVGMIWGGGSTDYNSALKSRFTISRDNSKNTLYLQMNSLRAEDTAVYYCARNGGYDVFHYWGQGTTVTVSSTREQKLISEEDGSGIQNPDPAVYQLRDSKSSDKSVCLFTDFDSQTNVSQSKDSDVYITDKTVLDMRSMDFKSNSAVAWSNKSDFACANAFNNSIIPEDTFFPSPESSCGTQSFGLLDPKLCYLLDGILFIYGVILTALFLRSKRSRLLHSDYMNMTPRRPGPTRKHYQPYAPPRDFAAYRSRVKFSRSADAPAYQQGQNQLYNELNLGRREEYDVLDKRRGRDPEMGGKPQRRKNPQEGLYNELQKDKMAEAYSEIGMKGERRRGKGHDGLYQGLSTATKDTYDALHMQALPPR

SEQ ID NO: 8469 - protein, 888 aa, Artificial Sequence
  Synthetic Polypeptide
MALPVTALLLPLALLLHAARPQAVVTQEPSLTVSPGGTVTLTCRSSTGAVTTSNYANWVQQKPGQAPRGLIGGTNKRAPWTPARFSGSLLGGKAALTLSGVQPEDEAEYYCALWYSNHLVFGGGTKLTVLLEGKPIPNPLLGLDSTGSGEDLKNVFPPEVAVFEPSEAEISHTQKATLVCLATGFYPDHVELSWWVNGKEVHSGVSTDPQPLKEQPALNDSRYCLSSRLRVSATFWQNPRNHFRCQVQFYGLSENDEWTQDRAKPVTQIVSAEAWGRADCGSQSFGLLDPKLCYLLDGILFIYGVILTALFLRVKFSRSADAPAYQQGQNQLYNELNLGRREEYDVLDKRRGRDPEMGGKPQRRKNPQEGLYNELQKDKMAEAYSEIGMKGERRRGKGHDGLYQGLSTATKDTYDALHMQALPPRRAKRSGSGATNFSLLKQAGDVEENPGPTSMDWIWRILFLVGAATGAHSFEEVQLVESGGGLVQPGGSLRLSCAASGFSLSRNSVHWVRQAPGKGLEWVGMIWGGGSTDYNSALKSRFTISRDNSKNTLYLQMNSLRAEDTAVYYCARNGGYDVFHYWGQGTTVTVSSTREQKLISEEDLGSGIQNPDPAVYQLRDSKSSDKSVCLFTDFDSQTNVSQSKDSDVYITDKTVLDMRSMDFKSNSAVAWSNKSDFACANAFNNSIIPEDTFFPSPESSCGTQSFGLLDPKLCYLLDGILFIYGVILTALFLKRGRKKLLYIFKQPFMRPVQTTQEEDGCSCRFPEEEEGGCELRVKFSRSADAPAYQQGQNQLYNELNLGRREEYDVLDKRRGRDPEMGGKPQRRKNPQEGLYNELQKDKMAEAYSEIGMKGERRRGKGHDGLYQGLSTATKDTYDALHMQALPPR

SEQ ID NO: 8470 - protein, 930 aa, Artificial Sequence
  Synthetic Polypeptide
MALPVTALLLPLALLLHAARPQAVVTQEPSLTVSPGGTVTLTCRSSTGAVTTSNYANWVQQKPGQAPRGLIGGTNKRAPWTPARFSGSLLGGKAALTLSGVQPEDEAEYYCALWYSNHLVFGGGTKLTVLLEGKPIPNPLLGLDSTGSGEDLKNVFPPEVAVFEPSEAEISHTQKATLVCLATGFYPDHVELSWWVNGKEVHSGVSTDPQPLKEQPALNDSRYCLSSRLRVSATFWQNPRNHFRCQVQFYGLSENDEWTQDRAKPVTQIVSAEAWGRADCGSQSFGLLDPKLCYLLDGILFIYGVILTALFLKRGRKKLLYIFKQPFMRPVQTTQEEDGCSCRFPEEEEGGCELRVKFSRSADAPAYQQGQNQLYNELNLGRREEYDVLDKRRGRDPEMGGKPQRRKNPQEGLYNELQKDKMAEAYSEIGMKGERRRGKGHDGLYQGLSTATKDTYDALHMQALPPRRAKRSGSGATNFSLLKQAGDVEENPGPTSMDWIWRILFLVGAATGAHSFEEVQLVESGGGLVQPGGSLRLSCAASGFSLSRNSVHWVRQAPGKGLEWVGMIWGGGSTDYNSALKSRFTISRDNSKNTLYLQMNSLRAEDTAVYYCARNGGYDVFHYWGQGTTVTVSSTREQKLISEEDLGSGIQNPDPAVYQLRDSKSSDKSVCLFTDFDSQTNVSQSKDSDVYITDKTVLDMRSMDFKSNSAVAWSNKSDFACANAFNNSIIPEDTFFPSPESSCGTQSFGLLDPKLCYLLDGILFIYGVILTALFLKRGRKKLLYIFKQPFMRPVQTTQEEDGCSCRFPEEEEGGCELRVKFSRSADAPAYQQGQNQLYNELNLGRREEYDVLDKRRGRDPEMGGKPQRRKNPQEGLYNELQKDKMAEAYSEIGMKGERRRGKGHDGLYQGLSTATKDTYDALHMQALPPR

SEQ ID NO: 8471 - protein, 820 aa, Artificial Sequence
  Synthetic Polypeptide
MALPVTALLLPLALLLHAARPQAVVTQEPSLTVSPGGTVTLTCRSSTGAVTTSNYANWVQQKPGQAPRGLIGGTNKRAPWTPARFSGSLLGGKAALTLSGVQPEDEAEYYCALWYSNHLVFGGGTKLTVLLEQSFGLLDPKLCYLLDGILFIYGVILTALFLRVKFSRSADAPAYQQGQNQLYNELNLGRREEYDVLDKRRGRDPEMGGKPQRRKNPQEGLYNELQKDKMAEAYSEIGMKGERRRGKGHDGLYQGLSTATKDTYDALHMQALPPRRAKRSGSGATNFSLLKQAGDVEENPGPTSMDWIWRILFLVGAATGAHSFEEVQLVESGGGLVQPGGSLRLSCAASGFSLSRNSVHWVRQAPGKGLEWVGMIWGGGSTDYNSALKSRFTISRDNSKNTLYLQMNSLRAEDTAVYYCARNGGYDVFHYWGQGTTVTVSSTRQSFGLLDPKLCYLLDGILFIYGVILTALFLRVKFSRSADAPAYQQGQNQLYNELNLGRREEYDVLDKRRGRDPEMGGKPQRRKNPQEGLYNELQKDKMAEAYSEIGMKGERRRGKGHDGLYQGLSTATKDTYDALHMQALPPRRAKRSGSGVKQTLNFDLLKLAGDVESNPGPSRGHMTEYKPTVRLATRDDVPRAVRTLAAAFADYPATRHTVDPDRHIERVTELQELFLTRVGLDIGKVWVADDGAAVAVWTTPESVEAGAVFAEIGPRMAELSGSRLAAQQQMEGLLAPHRPKEPAWFLATVGVSPDHQGKGLGSAVVLPGVEAAERAGVPAFLETSAPRNLPFYERLGFTVTADVEVPEGPRTWCMTRKPGA

SEQ ID NO: 8472 - protein, 645 aa, Artificial Sequence
  Synthetic Polypeptide
MALPVTALLLPLALLLHAARPQAVVTQEPSLTVSPGGTVTLTCRSSTGAVTTSNYANWVQQKPGQAPRGLIGGTNKRAPWTPARFSGSLLGGKAALTLSGVQPEDEAEYYCALWYSNHLVFGGGTKLTVLLEGQPKANPTVTLFPPSSEELQANKATLVCLISDFYPGAVTVAWKADGSPVKAGVETTKPSKQSNNKYAASSYLSLTPEQWKSHRSYSCQVTHEGSTVEKTVAPTECSPIKTDVITMDPKDNCSKDANDTLLLQLTNTSAYYMYLLLLLKSVVYFAIITCCLLRRTAFCCNGEKSRAKRSGSGATNFSLLKQAGDVEENPGPTSMDWIWRILFLVGAATGAHSFEEVQLVESGGGLVQPGGSLRLSCAASGFSLSRNSVHWVRQAPGKGLEWVGMIWGGGSTDYNSALKSRFTISRDNSKNTLYLQMNSLRAEDTAVYYCARNGGYDVFHYWGQGTTVTVSSTRASTKGPSVFPLAPSSKSTSGGTAALGCLVKDYFPEPVTVSWNSGALTSGVHTFPAVLQSSGLYSLSSVVTVPSSSLGTQTYICNVNHKPSNTKVDKRVEPKSCEVKTDSTDHVKPKETENTKQPSKSCHKPKAIVHTEKVNMMSLTVLGLRMLFAKTVAVNFLLTAKLFFL

SEQ ID NO: 8473 - protein, 623 aa, Artificial Sequence
  Synthetic Polypeptide
MALPVTALLLPLALLLHAARPQAVVTQEPSLTVSPGGTVTLTCRSSTGAVTTSNYANWVQQKPGQAPRGLIGGTNKRAPWTPARFSGSLLGGKAALTLSGVQPEDEAEYYCALWYSNHLVFGGGTKLTVLLEGQPKANPTVTLFPPSSEELQANKATLVCLISDFYPGAVTVAWKADGSPVKAGVETTKPSKQSNNKYAASSYLSLTPEQWKSHRSYSCQVTHEGSTVEKTVAPTECSGRADCGITSASYHQGVLSATILYEILLGKATLYAVLVSALVLMAMVKRKDSRGRAKRSGSGATNFSLLKQAGDVEENPGPTSMDWIWRILFLVGAATGAHSFEEVQLVESGGGLVQPGGSLRLSCAASGFSLSRNSVHWVRQAPGKGLEWVGMIWGGGSTDYNSALKSRFTISRDNSKNTLYLQMNSLRAEDTAVYYCARNGGYDVFHYWGQGTTVTVSSTRASTKGPSVFPLAPSSKSTSGGTAALGCLVKDYFPEPVTVSWNSGALTSGVHTFPAVLQSSGLYSLSSVVTVPSSSLGTQTYICNVNHKPSNTKVDKRVEPKSCIPEDTFFPSSDVPCDVKLVEKSFETDTNLNFQNLSVIGFRILLLKVAGFNLLMTLRLWSS

SEQ ID NO: 8474 - protein, 623 aa, Artificial Sequence
  Synthetic Polypeptide
MALPVTALLLPLALLLHAARPQAVVTQEPSLTVSPGGTVTLTCRSSTGAVTTSNYANWVQQKPGQAPRGLIGGTNKRAPWTPARFSGSLLGGKAALTLSGVQPEDEAEYYCALWYSNHLVFGGGTKLTVLLEGQPKANPTVTLFPPSSEELQANKATLVCLISDFYPGAVTVAWKADGSPVKAGVETTKPSKQSNNKYAASSYLSLTPEQWKSHRSYSCQVTHEGSTVEKTVAPTECSGRADCGFTSESYQQGVLSATILYEILLGKATLYAVLVSALVLMAMVKRKDSRGRAKRSGSGATNFSLLKQAGDVEENPGPTSMDWIWRILFLVGAATGAHSFEEVQLVESGGGLVQPGGSLRLSCAASGFSLSRNSVHWVRQAPGKGLEWVGMIWGGGSTDYNSALKSRFTISRDNSKNTLYLQMNSLRAEDTAVYYCARNGGYDVFHYWGQGTTVTVSSTRASTKGPSVFPLAPSSKSTSGGTAALGCLVKDYFPEPVTVSWNSGALTSGVHTFPAVLQSSGLYSLSSVVTVPSSSLGTQTYICNVNHKPSNTKVDKRVEPKSCIPEDTFFPSPESSCDVKLVEKSFETDTNLNFQNLSVIGFRILLLKVAGFNLLMTLRLWSS

SEQ ID NO: 8475 - protein, 449 aa, Artificial Sequence
  Synthetic Polypeptide
MALPVTALLLPLALLLHAARPQAVVTQEPSLTVSPGGTVTLTCRSSTGAVTTSNYANWVQQKPGQAPRGLIGGTNKRAPWTPARFSGSLLGGKAALTLSGVQPEDEAEYYCALWYSNHLVFGGGTKLTVLGGGGSGGGGSGGGGSEVQLVESGGGLVQPGGSLRLSCAASGFSLSRNSVHWVRQAPGKGLEWVGMIWGGGSTDYNSALKSRFTISRDNSKNTLYLQMNSLRAEDTAVYYCARNGGYDVFHYWGQGTTVTVSSTRDGNEEMGGITQTPYKVSISGTTVILTCPQYPGSEILWQHNDKNIGGDEDDKNIGSDEDHLSLKEFSELEQSGYYVCYPRGSKPEDANFYLYLRARVCENCMEMDVMSVATIVIVDICITGGLLLLVYYWSKNRKAKAKPVTRGAGAGGRQRGQNKERPPPVPNPDYEPIRKGQRDLYSGLNQRRI

SEQ ID NO: 8476 - protein, 414 aa, Artificial Sequence
  Synthetic Polypeptide
MALPVTALLLPLALLLHAARPQAVVTQEPSLTVSPGGTVTLTCRSSTGAVTTSNYANWVQQKPGQAPRGLIGGTNKRAPWTPARFSGSLLGGKAALTLSGVQPEDEAEYYCALWYSNHLVFGGGTKLTVLGGGGSGGGGSGGGGSEVQLVESGGGLVQPGGSLRLSCAASGFSLSRNSVHWVRQAPGKGLEWVGMIWGGGSTDYNSALKSRFTISRDNSKNTLYLQMNSLRAEDTAVYYCARNGGYDVFHYWGQGTTVTVSSTRFKIPIEELEDRVFVNCNTSITWVEGTVGTLLSDITRLDLGKRILDPRGIYRCNGTDIYKDKESTVQVHYRMCQSCVELDPATVAGIIVTDVIATLLLALGVFCFAGHETGRLSGAADTQALLRNDQVYQPLRDRDDAQYSHLGGNWARNK

SEQ ID NO: 8477 - protein, 424 aa, Artificial Sequence
  Synthetic Polypeptide
MALPVTALLLPLALLLHAARPQAVVTQEPSLTVSPGGTVTLTCRSSTGAVTTSNYANWVQQKPGQAPRGLIGGTNKRAPWTPARFSGSLLGGKAALTLSGVQPEDEAEYYCALWYSNHLVFGGGTKLTVLGGGGSGGGGSGGGGSEVQLVESGGGLVQPGGSLRLSCAASGFSLSRNSVHWVRQAPGKGLEWVGMIWGGGSTDYNSALKSRFTISRDNSKNTLYLQMNSLRAEDTAVYYCARNGGYDVFHYWGQGTTVTVSSTRQSIKGNHLVKVYDYQEDGSVLLTCDAEAKNITWFKDGKMIGFLTEDKKKWNLGSNAKDPRGMYQCKGSQNKSKPLQVYYRMCQNCIELNAATISGFLFAEIVSIFVLAVGVYFIAGQDGVRQSRASDKQTLLPNDQLYQPLKDREDDQYSHLQGNQLRRN

SEQ ID NO: 8478 - protein, 407 aa, Artificial Sequence
  Synthetic Polypeptide
MALPVTALLLPLALLLHAARPQAVVTQEPSLTVSPGGTVTLTCRSSTGAVTTSNYANWVQQKPGQAPRGLIGGTNKRAPWTPARFSGSLLGGKAALTLSGVQPEDEAEYYCALWYSNHLVFGGGTKLTVLGGGGSGGGGSGGGGSEVQLVESGGGLVQPGGSLRLSCAASGFSLSRNSVHWVRQAPGKGLEWVGMIWGGGSTDYNSALKSRFTISRDNSKNTLYLQMNSLRAEDTAVYYCARNGGYDVFHYWGQGTTVTVSSTRQSFGLLDPKLCYLLDGILFIYGVILTALFLRVKFSRSADAPAYQQGQNQLYNELNLGRREEYDVLDKRRGRDPEMGGKPQRRKNPQEGLYNELQKDKMAEAYSEIGMKGERRRGKGHDGLYQGLSTATKDTYDALHMQALPPR

SEQ ID NO: 8479 - protein, 449 aa, Artificial Sequence
  Synthetic Polypeptide
MALPVTALLLPLALLLHAARPEVQLVESGGGLVQPGGSLRLSCAASGFSLSRNSVHWVRQAPGKGLEWVGMIWGGGSTDYNSALKSRFTISRDNSKNTLYLQMNSLRAEDTAVYYCARNGGYDVFHYWGQGTTVTVSSGGGGSGGGGSGGGGSQAVVTQEPSLTVSPGGTVTLTCRSSTGAVTTSNYANWVQQKPGQAPRGLIGGTNKRAPWTPARFSGSLLGGKAALTLSGVQPEDEAEYYCALWYSNHLVFGGGTKLTVLTRDGNEEMGGITQTPYKVSISGTTVILTCPQYPGSEILWQHNDKNIGGDEDDKNIGSDEDHLSLKEFSELEQSGYYVCYPRGSKPEDANFYLYLRARVCENCMEMDVMSVATIVIVDICITGGLLLLVYYWSKNRKAKAKPVTRGAGAGGRQRGQNKERPPPVPNPDYEPIRKGQRDLYSGLNQRRI

SEQ ID NO: 8480 - protein, 414 aa, Artificial Sequence
  Synthetic Polypeptide
MALPVTALLLPLALLLHAARPEVQLVESGGGLVQPGGSLRLSCAASGFSLSRNSVHWVRQAPGKGLEWVGMIWGGGSTDYNSALKSRFTISRDNSKNTLYLQMNSLRAEDTAVYYCARNGGYDVFHYWGQGTTVTVSSGGGGSGGGGSGGGGSQAVVTQEPSLTVSPGGTVTLTCRSSTGAVTTSNYANWVQQKPGQAPRGLIGGTNKRAPWTPARFSGSLLGGKAALTLSGVQPEDEAEYYCALWYSNHLVFGGGTKLTVLTRFKIPIEELEDRVFVNCNTSITWVEGTVGTLLSDITRLDLGKRILDPRGIYRCNGTDIYKDKESTVQVHYRMCQSCVELDPATVAGIIVTDVIATLLLALGVFCFAGHETGRLSGAADTQALLRNDQVYQPLRDRDDAQYSHLGGNWARNK

SEQ ID NO: 8481 - protein, 424 aa, Artificial Sequence
  Synthetic Polypeptide
MALPVTALLLPLALLLHAARPEVQLVESGGGLVQPGGSLRLSCAASGFSLSRNSVHWVRQAPGKGLEWVGMIWGGGSTDYNSALKSRFTISRDNSKNTLYLQMNSLRAEDTAVYYCARNGGYDVFHYWGQGTTVTVSSGGGGSGGGGSGGGGSQAVVTQEPSLTVSPGGTVTLTCRSSTGAVTTSNYANWVQQKPGQAPRGLIGGTNKRAPWTPARFSGSLLGGKAALTLSGVQPEDEAEYYCALWYSNHLVFGGGTKLTVLTRQSIKGNHLVKVYDYQEDGSVLLTCDAEAKNITWFKDGKMIGFLTEDKKKWNLGSNAKDPRGMYQCKGSQNKSKPLQVYYRMCQNCIELNAATISGFLFAEIVSIFVLAVGVYFIAGQDGVRQSRASDKQTLLPNDQLYQPLKDREDDQYSHLQGNQLRRN

SEQ ID NO: 8482 - protein, 407 aa, Artificial Sequence
  Synthetic Polypeptide
MALPVTALLLPLALLLHAARPEVQLVESGGGLVQPGGSLRLSCAASGFSLSRNSVHWVRQAPGKGLEWVGMIWGGGSTDYNSALKSRFTISRDNSKNTLYLQMNSLRAEDTAVYYCARNGGYDVFHYWGQGTTVTVSSGGGGSGGGGSGGGGSQAVVTQEPSLTVSPGGTVTLTCRSSTGAVTTSNYANWVQQKPGQAPRGLIGGTNKRAPWTPARFSGSLLGGKAALTLSGVQPEDEAEYYCALWYSNHLVFGGGTKLTVLTRQSFGLLDPKLCYLLDGILFIYGVILTALFLRVKFSRSADAPAYQQGQNQLYNELNLGRREEYDVLDKRRGRDPEMGGKPQRRKNPQEGLYNELQKDKMAEAYSEIGMKGERRRGKGHDGLYQGLSTATKDTYDALHMQALPPR

SEQ ID NO: 8483 - protein, 900 aa, Artificial Sequence
  Synthetic Polypeptide
MALPVTALLLPLALLLHAARPQAVVTQEPSLTVSPGGTVTLTCRSSTGAVTTSNYANWVQQKPGQAPRGLIGGTNKRAPWTPARFSGSLLGGKAALTLSGVQPEDEAEYYCALWYSNHLVFGGGTKLTVLLELWVSQPPEIRTLEGSSAFLPCSFNASQGRLAIGSVTWFRDEVVPGKEVRNGTPEFRGRLAPLASSRFLHDHQAELHIRDVRGHDASIYVCRVEVLGLGVGTGNGTRLVVEKEHPQLGAGTVLLLRAGFYAVSFLSVAVGSTVYYQGKCLTWKGPRRQLPAVVPAPLPPPCGSSAHLLPPVPGGRAKRSGSGATNFSLLKQAGDVEENPGPTSMDWIWRILFLVGAATGAHSFEEVQLVESGGGLVQPGGSLRLSCAASGFSLSRNSVHWVRQAPGKGLEWVGMIWGGGSTDYNSALKSRFTISRDNSKNTLYLQMNSLRAEDTAVYYCARNGGYDVFHYWGQGTTVTVSSTRLWVSQPPEIRTLEGSSAFLPCSFNASQGRLAIGSVTWFRDEVVPGKEVRNGTPEFRGRLAPLASSRFLHDHQAELHIRDVRGHDASIYVCRVEVLGLGVGTGNGTRLVVEKEHPQLGAGTVLLLRAGFYAVSFLSVAVGSTVYYQGKCLTWKGPRRQLPAVVPAPLPPPCGSSAHLLPPVPGGRAKRSGSGVKQTLNFDLLKLAGDVESNPGPSRGHMTEYKPTVRLATRDDVPRAVRTLAAAFADYPATRHTVDPDRHIERVTELQELFLTRVGLDIGKVWVADDGAAVAVWTTPESVEAGAVFAEIGPRMAELSGSRLAAQQQMEGLLAPHRPKEPAWFLATVGVSPDHQGKGLGSAVVLPGVEAAERAGVPAFLETSAPRNLPFYERLGFTVTADVEVPEGPRTWCMTRKPGA

SEQ ID NO: 8484 - protein, 958 aa, Artificial Sequence
  Synthetic Polypeptide
MALPVTALLLPLALLLHAARPQAVVTQEPSLTVSPGGTVTLTCRSSTGAVTTSNYANWVQQKPGQAPRGLIGGTNKRAPWTPARFSGSLLGGKAALTLSGVQPEDEAEYYCALWYSNHLVFGGGTKLTVLLEGQPKANPTVTLFPPSSEELQANKATLVCLISDFYPGAVTVAWKADGSPVKAGVETTKPSKQSNNKYAASSYLSLTPEQWKSHRSYSCQVTHEGSTVEKTVAPTECSGSITQGLAVPTISSFFPPGYQVSFCLVMVLLFAVDTGLYFSVKTNIRSSTRDWKDHKFKWRKDPQDKRAKRSGSGVKQTLNFDLLKLAGDVESNPGPTSMDWIWRILFLVGAATGAHSFEEVQLVESGGGLVQPGGSLRLSCAASGFSLSRNSVHWVRQAPGKGLEWVGMIWGGGSTDYNSALKSRFTISRDNSKNTLYLQMNSLRAEDTAVYYCARNGGYDVFHYWGQGTTVTVSSTRASTKGPSVFPLAPSSKSTSGGTAALGCLVKDYFPEPVTVSWNSGALTSGVHTFPAVLQSSGLYSLSSVVTVPSSSLGTQTYICNVNHKPSNTKVDKRVEPKSCGTQSFGLLDPKLCYLLDGILFIYGVILTALFLRVKFSRSADAPAYQQGQNQLYNELNLGRREEYDVLDKRRGRDPEMGGKPQRRKNPQEGLYNELQKDKMAEAYSEIGMKGERRRGKGHDGLYQGLSTATKDTYDALHMQALPPRRAKRSGSGVKQTLNFDLLKLAGDVESNPGPSRGHMTEYKPTVRLATRDDVPRAVRTLAAAFADYPATRHTVDPDRHIERVTELQELFLTRVGLDIGKVWVADDGAAVAVWTTPESVEAGAVFAEIGPRMAELSGSRLAAQQQMEGLLAPHRPKEPAWFLATVGVSPDHQGKGLGSAVVLPGVEAAERAGVPAFLETSAPRNLPFYERLGFTVTADVEVPEGPRTWCMTRKPGA

SEQ ID NO: 8485 - protein, 735 aa, Artificial Sequence
  Synthetic Polypeptide
MALPVTALLLPLALLLHAARPQAVVTQEPSLTVSPGGTVTLTCRSSTGAVTTSNYANWVQQKPGQAPRGLIGGTNKRAPWTPARFSGSLLGGKAALTLSGVQPEDEAEYYCALWYSNHLVFGGGTKLTVLGGGGSGGGGSGGGGSEVQLVESGGGLVQPGGSLRLSCAASGFSLSRNSVHWVRQAPGKGLEWVGMIWGGGSTDYNSALKSRFTISRDNSKNTLYLQMNSLRAEDTAVYYCARNGGYDVFHYWGQGTTVTVSSTRGMRTEDLPKAVVFLEPQWYRVLEKDSVTLKCQGAYSPEDNSTQWFHNESLISSQASSYFIDAATVDDSGEYRCQTNLSTLSDPVQLEVHIGWLLLQAPRWVFKEEDPIHLRCHSWKNTALHKVTYLQNGKGRKYFHHNSDFYIPKATLKDSGSYFCRGLVGSKNVSSETVNITITQGLAVPTISSFFPPGYQVSFCLVMVLLFAVDTGLYFSVKTNIRSSTRDWKDHKFKWRKDPQDKRAKRSGSGVKQTLNFDLLKLAGDVESNPGPSRGHMTEYKPTVRLATRDDVPRAVRTLAAAFADYPATRHTVDPDRHIERVTELQELFLTRVGLDIGKVWVADDGAAVAVWTTPESVEAGAVFAEIGPRMAELSGSRLAAQQQMEGLLAPHRPKEPAWFLATVGVSPDHQGKGLGSAVVLPGVEAAERAGVPAFLETSAPRNLPFYERLGFTVTADVEVPEGPRTWCMTRKPGA

SEQ ID NO: 8486 - protein, 447 aa, Artificial Sequence
  Synthetic Polypeptide
MALPVTALLLPLALLLHAARPQAVVTQEPSLTVSPGGTVTLTCRSSTGAVTTSNYANWVQQKPGQAPRGLIGGTNKRAPWTPARFSGSLLGGKAALTLSGVQPEDEAEYYCALWYSNHLVFGGGTKLTVLGGGGSGGGGSGGGGSEVQLVESGGGLVQPGGSLRLSCAASGFSLSRNSVHWVRQAPGKGLEWVGMIWGGGSTDYNSALKSRFTISRDNSKNTLYLQMNSLRAEDTAVYYCARNGGYDVFHYWGQGTTVTVSSTRLWVSQPPEIRTLEGSSAFLPCSFNASQGRLAIGSVTWFRDEVVPGKEVRNGTPEFRGRLAPLASSRFLHDHQAELHIRDVRGHDASIYVCRVEVLGLGVGTGNGTRLVVEKEHPQLGAGTVLLLRAGFYAVSFLSVAVGSTVYYQGKCLTWKGPRRQLPAVVPAPLPPPCGSSAHLLPPVPGG

SEQ ID NO: 8487 - protein, 520 aa, Artificial Sequence
  Synthetic Polypeptide
MALPVTALLLPLALLLHAARPDQAVVTQEPSLTVSPGGTVTLTCRSSTGAVTTSNYANWVQQKPGQAPRGLIGGTNKRAPWTPARFSGSLLGGKAALTLSGVQPEDEAEYYCALWYSNHLVFGGGTKLTVLGGGGSGGGGSGGGGSEVQLVESGGGLVQPGGSLRLSCAASGFSLSRNSVHWVRQAPGKGLEWVGMIWGGGSTDYNSALKSRFTISRDNSKNTLYLQMNSLRAEDTAVYYCARNGGYDVFHYWGQGTTVTVSSTRQSKAQVLQSVAGQTLTVRCQYPPTGSLYEKKGWCKEASALVCIRLVTSSKPRTMAWTSRFTIWDDPDAGFFTVTMTDLREEDSGHYWCRIYRPSDNSVSKSVRFYLVVSPASASTQTSWTPRDLVSSQTQTQSCVPPTAGARQAPESPSTIPVPSQPQNSTLRPGPAAPIALVPVFCGLLVAKSLVLSALLVWWGDIWWKTMMELRSLDTQKATCHLQQVTDLPWTSVSSPVEREILYHTVARTKISDDDDEHTL

SEQ ID NO: 8488 - protein, 551 aa, Artificial Sequence
  Synthetic Polypeptide
MALPVTALLLPLALLLHAARPQAVVTQEPSLTVSPGGTVTLTCRSSTGAVTTSNYANWVQQKPGQAPRGLIGGTNKRAPWTPARFSGSLLGGKAALTLSGVQPEDEAEYYCALWYSNHLVFGGGTKLTVLGGGGSGGGGSGGGGSEVQLVESGGGLVQPGGSLRLSCAASGFSLSRNSVHWVRQAPGKGLEWVGMIWGGGSTDYNSALKSRFTISRDNSKNTLYLQMNSLRAEDTAVYYCARNGGYDVFHYWGQGTTVTVSSTRGGSGQQQTLPKPFIWAEPHFMVPKEKQVTICCQGNYGAVEYQLHFEGSLFAVDRPKPPERINKVQFYIPDMNSRMAGQYSCIYRVGELWSEPSNLLDLVVTEMYDTPTLSVHPGPEVISGEKVTFYCRLDTATSMFLLLKEGRSSHVQRGYGKVQAEFPLGPVTTAHRGTYRCFGSYNNHAWSFPSEPVKLLVTGDIENTSLAPEDPTFPADTWGTYLLTTETGLQKDHALWDHTAQNLLRMGLAFLVLVALVWFLVEDWLSRKRTRERASRASTWEGRRRLNTQTL

SEQ ID NO: 8489 - protein, 617 aa, Artificial Sequence
  Synthetic Polypeptide
MALPVTALLLPLALLLHAARPQAVVTQEPSLTVSPGGTVTLTCRSSTGAVTTSNYANWVQQKPGQAPRGLIGGTNKRAPWTPARFSGSLLGGKAALTLSGVQPEDEAEYYCALWYSNHLVFGGGTKLTVLGGGGSGGGGSGGGGSEVQLVESGGGLVQPGGSLRLSCAASGFSLSRNSVHWVRQAPGKGLEWVGMIWGGGSTDYNSALKSRFTISRDNSKNTLYLQMNSLRAEDTAVYYCARNGGYDVFHYWGQGTTVTVSSTRKIEVMYPPPYLDNEKSNGTIIHVKGARGDIENTSLAPEDPTFPADTWGTYLLTTETGLQKDHALWDHTAQNLLRMGLAFLVLVALVWFLVEDWLSRKRTRERASRASTWEGRRRLNTQTLRAKRSGSGVKQTLNFDLLKLAGDVESNPGPSRGHMTEYKPTVRLATRDDVPRAVRTLAAAFADYPATRHTVDPDRHIERVTELQELFLTRVGLDIGKVWVADDGAAVAVWTTPESVEAGAVFAEIGPRMAELSGSRLAAQQQMEGLLAPHRPKEPAWFLATVGVSPDHQGKGLGSAVVLPGVEAAERAGVPAFLETSAPRNLPFYERLGFTVTADVEVPEGPRTWCMTRKPGA

SEQ ID NO: 8490 - protein, 621 aa, Artificial Sequence
  Synthetic Polypeptide
MALPVTALLLPLALLLHAARPQAVVTQEPSLTVSPGGTVTLTCRSSTGAVTTSNYANWVQQKPGQAPRGLIGGTNKRAPWTPARFSGSLLGGKAALTLSGVQPEDEAEYYCALWYSNHLVFGGGTKLTVLGGGGSGGGGSGGGGSEVQLVESGGGLVQPGGSLRLSCAASGFSLSRNSVHWVRQAPGKGLEWVGMIWGGGSTDYNSALKSRFTISRDNSKNTLYLQMNSLRAEDTAVYYCARNGGYDVFHYWGQGTTVTVSSTRKIEVMYPPPYLDNEKSNGTIIHVKGARVAEGKTDNQYTLFVAGGTVLLLLFVISITTIIVIFLNRRRRRERRDLFTESWDTQKAPNNYRSPISTGQPTNQSMDDTREDIYVNYPTFSRRPKTRVRAKRSGSGVKQTLNFDLLKLAGDVESNPGPSRGHMTEYKPTVRLATRDDVPRAVRTLAAAFADYPATRHTVDPDRHIERVTELQELFLTRVGLDIGKVWVADDGAAVAVWTTPESVEAGAVFAEIGPRMAELSGSRLAAQQQMEGLLAPHRPKEPAWFLATVGVSPDHQGKGLGSAVVLPGVEAAERAGVPAFLETSAPRNLPFYERLGFTVTADVEVPEGPRTWCMTRKPGA

SEQ ID NO: 8491 - protein, 641 aa, Artificial Sequence
  Synthetic Polypeptide
MALPVTALLLPLALLLHAARPQAVVTQEPSLTVSPGGTVTLTCRSSTGAVTTSNYANWVQQKPGQAPRGLIGGTNKRAPWTPARFSGSLLGGKAALTLSGVQPEDEAEYYCALWYSNHLVFGGGTKLTVLGGGGSGGGGSGGGGSEVQLVESGGGLVQPGGSLRLSCAASGFSLSRNSVHWVRQAPGKGLEWVGMIWGGGSTDYNSALKSRFTISRDNSKNTLYLQMNSLRAEDTAVYYCARNGGYDVFHYWGQGTTVTVSSTRKIEVMYPPPYLDNEKSNGTIIHVKGARGDIENTSLAPEDPTFPADTWGTYLLTTETGLQKDHALWDHTAQNLLRMGLAFLVLVALVWFLVEDWLSRKRTRERASRASTWEGRRRLNTQTLRAKRSGSGVKQTLNFDLLKLAGDVESNPGPSRMYRMQLLSCIALSLALVTNSAPTSSSTKKTQLQLEHLLLDLQMILNGINNYKNPKLTEMLTAKFYMPKKATELKHLQCLEEELKPLEEVLNLAQSKNFHLRPRDLISNINVIVLELKGSETTFMCEYADETATIVEFLNRWITFCQSIISTLTKIEVMYPPPYLDNEKSNGTIIHVKGKHLCPSPLFPGPSKPFWVLVVVGGVLACYSLLVTVAFIIFWVRSKRS

SEQ ID NO: 8492 - protein, 589 aa, Artificial Sequence
  Synthetic Polypeptide
MALPVTALLLPLALLLHAARPQAVVTQEPSLTVSPGGTVTLTCRSSTGAVTTSNYANWVQQKPGQAPRGLIGGTNKRAPWTPARFSGSLLGGKAALTLSGVQPEDEAEYYCALWYSNHLVFGGGTKLTVLGGGGSGGGGSGGGGSEVQLVESGGGLVQPGGSLRLSCAASGFSLSRNSVHWVRQAPGKGLEWVGMIWGGGSTDYNSALKSRFTISRDNSKNTLYLQMNSLRAEDTAVYYCARNGGYDVFHYWGQGTTVTVSSTRKIEVMYPPPYLDNEKSNGTIIHVKGARITQGLAVSTISSFFPPGYQVSFCLVMVLLFAVDTGLYFSVKTNIRSSTRDWKDHKFKWRKDPQDKRAKRSGSGVKQTLNFDLLKLAGDVESNPGPSRGHMTEYKPTVRLATRDDVPRAVRTLAAAFADYPATRHTVDPDRHIERVTELQELFLTRVGLDIGKVWVADDGAAVAVWTTPESVEAGAVFAEIGPRMAELSGSRLAAQQQMEGLLAPHRPKEPAWFLATVGVSPDHQGKGLGSAVVLPGVEAAERAGVPAFLETSAPRNLPFYERLGFTVTADVEVPEGPRTWCMTRKPGA

SEQ ID NO: 8493 - protein, 709 aa, Artificial Sequence
  Synthetic Polypeptide
MALPVTALLLPLALLLHAARPQAVVTQEPSLTVSPGGTVTLTCRSSTGAVTTSNYANWVQQKPGQAPRGLIGGTNKRAPWTPARFSGSLLGGKAALTLSGVQPEDEAEYYCALWYSNHLVFGGGTKLTVLGGGGSGGGGSGGGGSEVQLVESGGGLVQPGGSLRLSCAASGFSLSRNSVHWVRQAPGKGLEWVGMIWGGGSTDYNSALKSRFTISRDNSKNTLYLQMNSLRAEDTAVYYCARNGGYDVFHYWGQGTTVTVSSTRKIEVMYPPPYLDNEKSNGTIIHVKGARDGNEEMGGITQTPYKVSISGTTVILTCPQYPGSEILWQHNDKNIGGDEDDKNIGSDEDHLSLKEFSELEQSGYYVCYPRGSKPEDANFYLYLRARVCENCMEMDVMSVATIVIVDICITGGLLLLVYYWSKNRKAKAKPVTRGAGAGGRQRGQNKERPPPVPNPDYEPIRKGQRDLYSGLNQRRIRAKRSGSGVKQTLNFDLLKLAGDVESNPGPSRDHMTEYKPTVRLATRDDVPRAVRTLAAAFADYPATRHTVDPDRHIERVTELQELFLTRVGLDIGKVWVADDGAAVAVWTTPESVEAGAVFAEIGPRMAELSGSRLAAQQQMEGLLAPHRPKEPAWFLATVGVSPDHQGKGLGSAVVLPGVEAAERAGVPAFLETSAPRNLPFYERLGFTVTADVEVPEGPRTWCMTRKPGA

SEQ ID NO: 8494 - protein, 704 aa, Artificial Sequence
  Synthetic Polypeptide
MALPVTALLLPLALLLHAARPQAVVTQEPSLTVSPGGTVTLTCRSSTGAVTTSNYANWVQQKPGQAPRGLIGGTNKRAPWTPARFSGSLLGGKAALTLSGVQPEDEAEYYCALWYSNHLVFGGGTKLTVLGGGGSGGGGSGGGGSEVQLVESGGGLVQPGGSLRLSCAASGFSLSRNSVHWVRQAPGKGLEWVGMIWGGGSTDYNSALKSRFTISRDNSKNTLYLQMNSLRAEDTAVYYCARNGGYDVFHYWGQGTTVTVSSTRKIEVMYPPPYLDNEKSNGTIIHVKGARKSVRFYLVVSPASASTQTSWTPRDLVSSQTQTQSCVPPTAGARQAPESPSTIPVPSQPQNSTLRPGPAAPIALVPVFCGLLVAKSLVLSALLVWWGDIWWKTMMELRSLDTQKATCHLQQVTDLPWTSVSSPVEREILYHTVARTKISDDDDEHTLRAKRSGSGVKQTLNFDLLKLAGDVESNPGPSRMYRMQLLSCIALSLALVTNSAPTSSSTKKTQLQLEHLLLDLQMILNGINNYKNPKLTEMLTAKFYMPKKATELKHLQCLEEELKPLEEVLNLAQSKNFHLRPRDLISNINVIVLELKGSETTFMCEYADETATIVEFLNRWITFCQSIISTLTKIEVMYPPPYLDNEKSNGTIIHVKGKHLCPSPLFPGPSKPFWVLVVVGGVLACYSLLVTVAFIIFWVRSKRS

SEQ ID NO: 8495 - protein, 641 aa, Artificial Sequence
  Synthetic Polypeptide
MALPVTALLLPLALLLHAARPQAVVTQEPSLTVSPGGTVTLTCRSSTGAVTTSNYANWVQQKPGQAPRGLIGGTNKRAPWTPARFSGSLLGGKAALTLSGVQPEDEAEYYCALWYSNHLVFGGGTKLTVLGGGGSGGGGSGGGGSEVQLVESGGGLVQPGGSLRLSCAASGFSLSRNSVHWVRQAPGKGLEWVGMIWGGGSTDYNSALKSRFTISRDNSKNTLYLQMNSLRAEDTAVYYCARNGGYDVFHYWGQGTTVTVSSTRTTTPAPRPPTPAPTIASQPLSLRPEACRPAAGGAVHTRGLDFACDARVAEGKTDNQYTLFVAGGTVLLLLFVISITTIIVIFLNRRRRRERRDLFTESWDTQKAPNNYRSPISTGQPTNQSMDDTREDIYVNYPTFSRRPKTRVRAKRSGSGVKQTLNFDLLKLAGDVESNPGPSRGHMTEYKPTVRLATRDDVPRAVRTLAAAFADYPATRHTVDPDRHIERVTELQELFLTRVGLDIGKVWVADDGAAVAVWTTPESVEAGAVFAEIGPRMAELSGSRLAAQQQMEGLLAPHRPKEPAWFLATVGVSPDHQGKGLGSAVVLPGVEAAERAGVPAFLETSAPRNLPFYERLGFTVTADVEVPEGPRTWCMTRKPGA

SEQ ID NO: 8496 - protein, 700 aa, Artificial Sequence
  Synthetic Polypeptide
MALPVTALLLPLALLLHAARPQAVVTQEPSLTVSPGGTVTLTCRSSTGAVTTSNYANWVQQKPGQAPRGLIGGTNKRAPWTPARFSGSLLGGKAALTLSGVQPEDEAEYYCALWYSNHLVFGGGTKLTVLGGGGSGGGGSGGGGSEVQLVESGGGLVQPGGSLRLSCAASGFSLSRNSVHWVRQAPGKGLEWVGMIWGGGSTDYNSALKSRFTISRDNSKNTLYLQMNSLRAEDTAVYYCARNGGYDVFHYWGQGTTVTVSSTRTTTPAPRPPTPAPTIASQPLSLRPEACRPAAGGAVHTRGLDFACDARKSVRFYLVVSPASASTQTSWTPRDLVSSQTQTQSCVPPTAGARQAPESPSTIPVPSQPQNSTLRPGPAAPIALVPVFCGLLVAKSLVLSALLVWWGDIWWKTMMELRSLDTQKATCHLQQVTDLPWTSVSSPVEREILYHTVARTKISDDDDEHTLRAKRSGSGVKQTLNFDLLKLAGDVESNPGPSRGHMTEYKPTVRLATRDDVPRAVRTLAAAFADYPATRHTVDPDRHIERVTELQELFLTRVGLDIGKVWVADDGAAVAVWTTPESVEAGAVFAEIGPRMAELSGSRLAAQQQMEGLLAPHRPKEPAWFLATVGVSPDHQGKGLGSAVVLPGVEAAERAGVPAFLETSAPRNLPFYERLGFTVTADVEVPEGPRTWCMTRKPGA

SEQ ID NO: 8497 - protein, 606 aa, Artificial Sequence
  Synthetic Polypeptide
MALPVTALLLPLALLLHAARPQAVVTQEPSLTVSPGGTVTLTCRSSTGAVTTSNYANWVQQKPGQAPRGLIGGTNKRAPWTPARFSGSLLGGKAALTLSGVQPEDEAEYYCALWYSNHLVFGGGTKLTVLGGGGSGGGGSGGGGSEVQLVESGGGLVQPGGSLRLSCAASGFSLSRNSVHWVRQAPGKGLEWVGMIWGGGSTDYNSALKSRFTISRDNSKNTLYLQMNSLRAEDTAVYYCARNGGYDVFHYWGQGTTVTVSSTRTTTPAPRPPTPAPTIASQPLSLRPEACRPAAGGAVHTRGLDFACDGTITQGLAVSTISSFFPPGYQVSFCLVMVLLFAVDTGLYFSVKTNIRSSTRDWKDHKFKWRKDPQDKRAKRSGSGATNFSLLKQAGDVEENPGPSRGHMTEYKPTVRLATRDDVPRAVRTLAAAFADYPATRHTVDPDRHIERVTELQELFLTRVGLDIGKVWVADDGAAVAVWTTPESVEAGAVFAEIGPRMAELSGSRLAAQQQMEGLLAPHRPKEPAWFLATVGVSPDHQGKGLGSAVVLPGVEAAERAGVPAFLETSAPRNLPFYERLGFTVTADVEVPEGPRTWCMTRKPGA

SEQ ID NO: 8498 - protein, 732 aa, Artificial Sequence
  Synthetic Polypeptide
MALPVTALLLPLALLLHAARPQAVVTQEPSLTVSPGGTVTLTCRSSTGAVTTSNYANWVQQKPGQAPRGLIGGTNKRAPWTPARFSGSLLGGKAALTLSGVQPEDEAEYYCALWYSNHLVFGGGTKLTVLGGGGSGGGGSGGGGSEVQLVESGGGLVQPGGSLRLSCAASGFSLSRNSVHWVRQAPGKGLEWVGMIWGGGSTDYNSALKSRFTISRDNSKNTLYLQMNSLRAEDTAVYYCARNGGYDVFHYWGQGTTVTVSSTRTTTPAPRPPTPAPTIASQPLSLRPEACRPAAGGAVHTRGLDFACDGTTTPGERSSLPAFYPGTSGSCSGCGSLSLPLLAGLVAADAVASLLIVGAVFLCARPRRSPAQEDGKVYINMPGRGSSRRVKFSRSADAPAYQQGQNQLYNELNLGRREEYDVLDKRRGRDPEMGGKPQRRKNPQEGLYNELQKDKMAEAYSEIGMKGERRRGKGHDGLYQGLSTATKDTYDALHMQALPPRRAKRSGSGVKQTLNFDLLKLAGDVESNPGPGHMTEYKPTVRLATRDDVPRAVRTLAAAFADYPATRHTVDPDRHIERVTELQELFLTRVGLDIGKVWVADDGAAVAVWTTPESVEAGAVFAEIGPRMAELSGSRLAAQQQMEGLLAPHRPKEPAWFLATVGVSPDHQGKGLGSAVVLPGVEAAERAGVPAFLETSAPRNLPFYERLGFTVTADVEVPEGPRTWCMTRKPGA

SEQ ID NO: 8499 - protein, 637 aa, Artificial Sequence
  Synthetic Polypeptide
MALPVTALLLPLALLLHAARPQAVVTQEPSLTVSPGGTVTLTCRSSTGAVTTSNYANWVQQKPGQAPRGLIGGTNKRAPWTPARFSGSLLGGKAALTLSGVQPEDEAEYYCALWYSNHLVFGGGTKLTVLGGGGSGGGGSGGGGSEVQLVESGGGLVQPGGSLRLSCAASGFSLSRNSVHWVRQAPGKGLEWVGMIWGGGSTDYNSALKSRFTISRDNSKNTLYLQMNSLRAEDTAVYYCARNGGYDVFHYWGQGTTVTVSSTRTTTPAPRPPTPAPTIASQPLSLRPEACRPAAGGAVHTRGLDFACDARGDIENTSLAPEDPTFPADTWGTYLLTTETGLQKDHALWDHTAQNLLRMGLAFLVLVALVWFLVEDWLSRKRTRERASRASTWEGRRRLNTQTLRAKRSGSGVKQTLNFDLLKLAGDVESNPGPSRGHMTEYKPTVRLATRDDVPRAVRTLAAAFADYPATRHTVDPDRHIERVTELQELFLTRVGLDIGKVWVADDGAAVAVWTTPESVEAGAVFAEIGPRMAELSGSRLAAQQQMEGLLAPHRPKEPAWFLATVGVSPDHQGKGLGSAVVLPGVEAAERAGVPAFLETSAPRNLPFYERLGFTVTADVEVPEGPRTWCMTRKPGA

SEQ ID NO: 8500 - protein, 778 aa, Artificial Sequence
  Synthetic Polypeptide
MALPVTALLLPLALLLHAARPQAVVTQEPSLTVSPGGTVTLTCRSSTGAVTTSNYANWVQQKPGQAPRGLIGGTNKRAPWTPARFSGSLLGGKAALTLSGVQPEDEAEYYCALWYSNHLVFGGGTKLTVLGGGGSGGGGSGGGGSEVQLVESGGGLVQPGGSLRLSCAASGFSLSRNSVHWVRQAPGKGLEWVGMIWGGGSTDYNSALKSRFTISRDNSKNTLYLQMNSLRAEDTAVYYCARNGGYDVFHYWGQGTTVTVSSTRQSKAQVLQSVAGQTLTVRCQYPPTGSLYEKKGWCKEASALVCIRLVTSSKPRTMAWTSRFTIWDDPDAGFFTVTMTDLREEDSGHYWCRIYRPSDNSVSKSVRFYLVVSPASASTQTSWTPRDLVSSQTQTQSCVPPTAGARQAPESPSTIPVPSQPQNSTLRPGPAAPIALVPVFCGLLVAKSLVLSALLVWWGDIWWKTMMELRSLDTQKATCHLQQVTDLPWTSVSSPVEREILYHTVARTKISDDDDEHTLRAKRSGSGVKQTLNFDLLKLAGDVESNPGPSRMYRMQLLSCIALSLALVTNSAPTSSSTKKTQLQLEHLLLDLQMILNGINNYKNPKLTRMLTFKFYMPKKATELKHLQCLEEELKPLEEVLNLAQSKNFHLRPRDLISNINVIVLELKGSETTFMCEYADETATIVEFLNRWITFCQSIISTLTARKIEVMYPPPYLDNEKSNGTIIHVKGKHLCPSPLFPGPSKPFWVLVVVGGVLACYSLLVTVAFIIFWVRSKRS

SEQ ID NO: 8501 - DNA, 14 bp, Artificial Sequence
  Synthetic Polynucleotide
gggggggggggggg

SEQ ID NO: 8502 - DNA, 14 bp, Artificial Sequence
  Synthetic Polynucleotide
gggggggggggggg

SEQ ID NO: 8503 - DNA, 14 bp, Artificial Sequence
  Synthetic Polynucleotide
gggggggggggggg

SEQ ID NO: 8504 - DNA, 76 bp, Artificial Sequence
  Synthetic Polynucleotide
gcttgtgattttgtttagggcggaaaaataaattttcctttgtttttccacatcggtgccttcacatatacaagcc

SEQ ID NO: 8505 - DNA, 231 bp, Artificial Sequence
  Synthetic Polynucleotide
ggctccggtgcccgtcagtgggcagagcgcacatcgcccacagtccccgagaagttggggggaggggtcggcaattgaaccggtgcctagagaaggtggcgcggggtaaactgggaaagtgatgtcgtgtactggctccgcctttttcccgagggtgggggagaaccgtatataagtgcagtagtcgccgtgaacgttctttttcgcaacgggtttgccgccagaacacag

SEQ ID NO: 8506 - DNA, 212 bp, Artificial Sequence
  Synthetic Polynucleotide
gggcagagcgcacatcgcccacagtccccgagaagttggggggaggggtcggcaattgaaccggtgcctagagaaggtggcgcggggtaaactgggaaagtgatgtcgtgtactggctccgcctttttcccgagggtgggggagaaccgtatataagtgcagtagtcgccgtgaacgttctttttcgcaacgggtttgccgccagaacacag

SEQ ID NO: 8507 - DNA, 262 bp, Artificial Sequence
  Synthetic Polynucleotide
aatgtagtcttatgcaatactcttgtagtcttgcaacatggtaacgatgagttagcaacatgccttacaaggagagaaaaagcaccgtgcatgccgattggtggaagtaaggtggtacgatcgtgccttattaggaaggcaacagacgggtctgacatggattggacgaaccactgaattccgcattgcagagatattgtatttaagtgcctagctcgatacaataaacgccatttgaccattcaccacattggtgtgcacc

SEQ ID NO: 8508 - DNA, 263 bp, Artificial Sequence
  Synthetic Polynucleotide
aaatgtagtcttatgcaatactcttgtagtcttgcaacatggtaacgatgagttagcaacatgccttacaaggagagaaaaagcaccgtacatgccgattggtggaagtaaggtggtacgatcgtgccttattaggaaggcaacagacgggtctgacatggattggacgaaccactaaattccgcattgcagagatattgtatttaagtgcctagctcgatacaataaacgccatttgaccattcaccacattggtgtgcacc

SEQ ID NO: 8509 - DNA, 3401 bp, Artificial Sequence
  Synthetic Polynucleotide
atggccttaccagtgaccgccttgctcctgccgctggccttgctgctccacgccgccaggccggacatccagatgacacagagccctagcagcctgtctgccagcgtgggagacagagtgaccatcacatgcaaggccagcgaccacatcaacaactggctggcctggtatcagcagaagcctggacaggcccctaagctgctgatctacggcgctaccacactggaaacaggcgtgcccagcagattttctggcagcggctctggcaccgactacaccctgacaatatccagcctccagcctgaggacttcgccacctactactgtcagcagagctggaacaccccttggacattcggccagggcaccaagctggaaatcaagagactcgaggacctgaagaacgtgttcccacctgaggtggccgtgttcgagcctagcgaggccgagatcagccacacccagaaagccaccctcgtgtgcctggctaccggcttctaccccgaccatgtggaactgtcttggtgggtcaacggcaaagaggtgcacagcggcgtgtctaccgacccccagccactgaaagaacagcccgccctgaacgacagccggtactgcctgagcagcagactgagagtgtccgccaccttctggcagaacccccggaaccacttcagatgccaggtgcagttctacggcctgagcgagaacgacgagtggacccaggacagagccaagcccgtgacccagatcgtgtctgccgaagcctggggcagagccgattgcggatcccagagcttcggcctgctggaccccaagctgtgctacctgctggatggcatcctgttcatctacggcgtgatcctgaccgccctgttcctgagagtgaagttcagcagaagcgccgacgcccctgcctaccagcagggacagaaccaactgtacaacgagctgaacctgggcagacgggaagagtacgacgtgctggacaagcggagaggcagggaccctgagatgggcggaaagccccagcggagaaagaacccccaggaaggactgtataacgaactccagaaagacaagatggccgaagcctacagcgagatcggcatgaagggcgagcggagaagaggcaagggccacgatggcctgtaccagggcctgagcaccgccaccaaggacacctatgacgccctgcacatgcaggccctgcctccaagaagggccaagcgatctggatctggagcaacaaacttctcactactcaaacaagcaggtgacgtggaggagaatcccgggcctactagtatggactggatttggcgcatccttttccttgtcggcgctgctaccggcgcgcattccttcgaacaagttcagcttcaacagcctggcgctgagctggtcaaacctggcgcttctgtgaagatgagctgcaaagccagcggctacgccttcagcagctactggatcaactggatgaagcagaaacccggccagggactcgaatggatcggccaaatctatcccggcgacggcgacaccaactacaacggcaagttcaagggcagagccacactgaccgccgatacctctagcagcacagcctacatgcagctgagcagcctgaccagcgaagatagcgccgtgtacttctgtgcccggtccatcacaacagtcgtgggctgcgctatggactattggggccagggaacaagcgtgaccgtgtctagtacgcgtatccagaaccctgatcctgccgtgtaccagctgcgggatagcaagagcagcgacaagagcgtgtgtctgttcaccgacttcgacagccagaccaacgtgtcccagagcaaggactccgacgtgtacatcaccgataagaccgtgctggacatgcggagcatggacttcaagagcaactccgccgtggcctggtccaacaagtccgatttcgcctgcgccaacgccttcaacaacagcattatccccgaggacacattcttcccaagccccgagagcagctgcggtacccagagttttgggttgttggaccctaaattgtgctatctgttggacggaatcctgttcatttacggagtgatcctgaccgcattgttcctgcgggttaagttttccagatccgcagacgcacccgcttaccaacaagggcagaaccaactctacaatgaacttaatttggggcggagggaagagtacgacgttctggacaaaaggaggggacgagatcccgagatgggcggaaagcctcagcgaaggaagaatccgcaagaggggctttataacgaactccagaaagataaaatggcagaagcctatagtgagattgggatgaagggagaaaggaggaggggtaaaggtcacgatgggttgtaccaaggattgagcacagccactaaagatacctatgatgcgctccacatgcaggccctgccgccaagataatctagaggctccggtgcccgtcagtgggcagagcgcacatcgcccacagtccccgagaagttggggggaggggtcggcaattgaaccggtgcctagagaaggtggcgcggggtaaactgggaaagtgatgtcgtgtactggctccgcctttttcccgagggtgggggagaaccgtatataagtgcagtagtcgccgtgaacgttctttttcgcaacgggtttgccgccagaacacaggtaccatgtaccggatgcagctgctgagctgtatcgccctgtctctggccctggtcacaaatagcgcccctaccagcagcagcaccaagaaaacccagctgcaactggaacacctcctgctggacctccagatgatcctgaacggcatcaacaactacaagaaccccaagctgacccggatgctgaccttcaagttctacatgcccaagaaggccaccgagctgaagcacctccagtgcctggaagaggaactgaagcccctggaagaagtgctgaatctggcccagagcaagaacttccacctgaggccaagggacctgatctccaacatcaacgtgatcgtgctggaactgaaaggcagcgagacaaccttcatgtgcgagtacgccgacgagacagctaccatcgtggaatttctgaatcggtggatcaccttctgccagagcatcatcagcaccctgacacatatgttgcagatggctgggcagtgctcccaaaatgaatattttgacagtttgttgcatgcttgcataccttgtcaacttcgatgttcttctaatactcctcctctaacatgtcagcgttattgtaatgcaagtgtgaccaattcagtgaaaggaacgaatgcgattctctggacctgtttgggactgagcttaataatttctttggcagttttcgtgctaatgtttttgctaaggaagtaa

SEQ ID NO: 8510 - DNA, 2422 bp, Artificial Sequence
  Synthetic Polynucleotide
atggccttaccagtgaccgccttgctcctgccgctggccttgctgctccacgccgccaggccggacatccagatgacacagagccctagcagcctgtctgccagcgtgggagacagagtgaccatcacatgcaaggccagccaggatgtgggcacagccgtggattggtatcagcagaagcctggcaaggcccctaagctgctgatctactgggccagcacaagacacacaggcgtgcccagcagattttctggcagcggctctggcaccgacttcaccctgacaatatccagcctccagcctgaggacttcgccacctactactgccagcagtacaacagctaccctctgaccttcggccagggcaccaaggtggaaatcaaaagactcgaggtgtcccccaagcctaccatcttcctgccctctatcgccgagacaaagctccagaaggccggcacctacctgtgcctgctggaaaagttcttcccagatgtgattaagatccactggcaggaaaagaagtccaacaccatcctgggcagccaggaaggcaacaccatgaagaccaacgacacctacatgaagttcagctggctgaccgtgcccgagaagtccctggacaaagaacacagatgcatcgtgcggcacgaaaacaacaagaacggcgtggaccaggaaatcatcttcccacccatcaagaccgatgtgattacaatggaccccaaggacaactgctccaaggacgccaacgataccctgctgctccagctgaccaacaccagcgcctactacatgtacttgttgctgctgctgaagtccgtggtgtacttcgccatcatcacatgctgcctgctgcggagaaccgccttctgctgcaacggcgagaagtctagggccaagcgatctggatctggagcaacaaacttctcactactcaaacaagcaggtgacgtggaggagaatcccgggcctactagtatggactggatttggcgcatccttttccttgtcggcgctgctaccggcgcgcattccttcgaagtgcagctggttgaatcaggtggcggcctggttcaacctggcggatctctgagactgagctgtgccgccagcggctacacctttaccgagtacacaatccactgggtccgacaggcccctggcaaaggacttgagtgggtcgccaacatcaaccccaacaatggcggcaccacctacaaccagaagttcgaggacagattcaccatcagccgggacaacagcaagaacaccctgtacctccagatgaactccctgagagccgaggacaccgccgtgtactattgtgccagaggctggaacttcgactactggggccagggaacactggtcaccgttagctctacgcgtcctcacaccaagcccagcgtgttcgtgatgaagaacggcaccaacgtggcctgcctcgtgaaagagttctaccccaaggacatcaggatcaacctggtgtccagcaagaagatcaccgagttcgaccccgccatcgtgatctcccccagcggcaagtacaacgccgtgaagctggggaagtacgaggacagcaacagcgtgacctgctccgtgcagcacgacaacaagaccgtgcacagcaccgactttgaagtgaaaaccgactccaccgaccacgtgaagcccaaagagacagagaacaccaagcagcccagcaagagctgccacaagcccaaggccatcgtgcacaccgagaaagtgaacatgatgagcctgaccgtgctgggcctgcggatgctgttcgccaaaaccgtggccgtgaacttcctgctgaccgccaagctgttcttcctctaagtcgagtaatctagaaatgtagtcttatgcaatactcttgtagtcttgcaacatggtaacgatgagttagcaacatgccttacaaggagagaaaaagcaccgtgcatgccgattggtggaagtaaggtggtacgatcgtgccttattaggaaggcaacagacgggtctgacatggattggacgaaccactgaattccgcattgcagagatattgtatttaagtgcctagctcgatacaataaacgccatttgaccattcaccacattggtgtgcaccggtaccatggattggatatggaggatactttttctcgtgggggcagcaaccggggctcattccttgcagatggctgggcagtgctcccaaaatgaatattttgacagtttgttgcacgcttgcataccttgtcaacttcgatgttcttctaatactcctcctctaacatgtcagcgttattgtaatgcaagtgtgaccaattcagtgaaaggaacgaatgcgattctctggacctgtttgggactgagcttaataatttctttggcagttttcgtgctaatgtttttgctaaggaagtaa

SEQ ID NO: 8511 - DNA, 3401 bp, Artificial Sequence; identical to SEQ ID NO: 8509
  Synthetic Polynucleotide

SEQ ID NO: 8512 - DNA, 3329 bp, Artificial Sequence
  Synthetic Polynucleotide
atggccttaccagtgaccgccttgctcctgccgctggccttgctgctccacgccgccaggccggacatccagatgacacagagccctagcagcctgtctgccagcgtgggagacagagtgaccatcacatgcaaggccagcgaccacatcaacaactggctggcctggtatcagcagaagcctggacaggcccctaagctgctgatctacggcgctaccacactggaaacaggcgtgcccagcagattttctggcagcggctctggcaccgactacaccctgacaatatccagcctccagcctgaggacttcgccacctactactgtcagcagagctggaacaccccttggacattcggccagggcaccaagctggaaatcaagagactcgagggacagcctaaggccaatcctaccgtgacactgttccctccaagcagcgaagaactccaggccaacaaggccacacttgtgtgcctgatctccgacttctaccctggggctgtgacagtggcttggaaggccgatggatctcctgtgaaagccggcgtggaaaccaccaagccatccaagcagagcaacaacaaatacgccgccagctcctacctgagcctgacacctgagcagtggaagtcccacagatcctacagctgccaagtgacccacgaaggcagcaccgtggaaaagacagtggcccctacagagtgcagcggatcccagagcttcggcctgctggaccccaagctgtgctacctgctggatggcatcctgttcatctacggcgtgatcctgaccgccctgttcctgagagtgaagttcagcagaagcgccgacgcccctgcctaccagcagggacagaaccaactgtacaacgagctgaacctgggcagacgggaagagtacgacgtgctggacaagcggagaggcagggaccctgagatgggcggaaagccccagcggagaaagaacccccaggaaggactgtataacgaactccagaaagacaagatggccgaagcctacagcgagatcggcatgaagggcgagcggagaagaggcaagggccacgatggcctgtaccagggcctgagcaccgccaccaaggacacctatgacgccctgcacatgcaggccctgcctccaagaagggccaagcgatctggatctggagcaacaaacttctcactactcaaacaagcaggtgacgtggaggagaatcccgggcctactagtatggactggatttggcgcatccttttccttgtcggcgctgctaccggcgcgcattccttcgaacaagttcagcttcaacagcctggcgctgagctggtcaaacctggcgcttctgtgaagatgagctgcaaagccagcggctacgccttcagcagctactggatcaactggatgaagcagaaacccggccagggactcgaatggatcggccaaatctatcccggcgacggcgacaccaactacaacggcaagttcaagggcagagccacactgaccgccgatacctctagcagcacagcctacatgcagctgagcagcctgaccagcgaagatagcgccgtgtacttctgtgcccggtccatcacaacagtcgtgggctgcgctatggactattggggccagggaacaagcgtgaccgtgtctagtacgcgtatccagaaccctgatcctgccgtgtaccagctgcgggatagcaagagcagcgacaagagcgtgtgtctgttcaccgacttcgacagccagaccaacgtgtcccagagcaaggactccgacgtgtacatcaccgataagaccgtgctggacatgcggagcatggacttcaagagcaactccgccgtggcctggtccaacaagtccgatttcgcctgcgccaacgccttcaacaacagcattatccccgaggacacattcttcccaagccccgagagcagctgcggtacccagagttttgggttgttggaccctaaattgtgctatctgttggacggaatcctgttcatttacggagtgatcctgaccgcattgttcctgcgggttaagttttccagatccgcagacgcacccgcttaccaacaagggcagaaccaactctacaatgaacttaatttggggcggagggaagagtacgacgttctggacaaaaggaggggacgagatcccgagatgggcggaaagcctcagcgaaggaagaatccgcaagaggggctttataacgaactccagaaagataaaatggcagaagcctatagtgagattgggatgaagggagaaaggaggaggggtaaaggtcacgatgggttgtaccaaggattgagcacagccactaaagatacctatgatgcgctccacatgcaggccctgccgccaagataatctagaggctccggtgcccgtcagtgggcagagcgcacatcgcccacagtccccgagaagttggggggaggggtcggcaattgaaccggtgcctagagaaggtggcgcggggtaaactgggaaagtgatgtcgtgtactggctccgcctttttcccgagggtgggggagaaccgtatataagtgcagtagtcgccgtgaacgttctttttcgcaacgggtttgccgccagaacacaggtaccatgtaccggatgcagctgctgagctgtatcgccctgtctctggccctggtcacaaatagcgcccctaccagcagcagcaccaagaaaacccagctgcaactggaacacctcctgctggacctccagatgatcctgaacggcatcaacaactacaagaaccccaagctgacccggatgctgaccttcaagttctacatgcccaagaaggccaccgagctgaagcacctccagtgcctggaagaggaactgaagcccctggaagaagtgctgaatctggcccagagcaagaacttccacctgaggccaagggacctgatctccaacatcaacgtgatcgtgctggaactgaaaggcagcgagacaaccttcatgtgcgagtacgccgacgagacagctaccatcgtggaatttctgaatcggtggatcaccttctgccagagcatcatcagcaccctgacacatatgttgcagatggctgggcagtgctcccaaaatgaatattttgacagtttgttgcatgcttgcataccttgtcaacttcgatgttcttctaatactcctcctctaacatgtcagcgttattgtaatgcaagtgtgaccaattcagtgaaaggaacgaatgcgattctctggacctgtttgggactgagcttaataatttctttggcagttttcgtgctaatgtttttgctaaggaagtaa

SEQ ID NO: 8513 - DNA, 14 bp, Artificial Sequence
  Synthetic Polynucleotide
gggggggggggggg

SEQ ID NO: 8514 - DNA, 342 bp, Artificial Sequence
  Synthetic Polynucleotide
caagaagtgacacagatccctgccgctctgtctgtgcctgagggcgaaaacctggtgctgaactgctccttcaccgacagcgccatctacaacctccagtggttcagacaggaccccggcaagggactgacaagcctgctgcttattagcccctggcagagagagcagaccagcggcagactgaatgccagcctggataagtcctccggcagaagcaccctgtatatcgccgcttctcagcctggcgatagcgccacatatctgtgtgccgtcagacccctgctggacggcacatatatccccacctttggcagaggcaccagcctgatcgtgcacccctac

SEQ ID NO: 8515 - DNA, 717 bp, Artificial Sequence
  Synthetic Polynucleotide
ggcgttacccagacacctaagttccaggtgctgaaaaccggccagagcatgaccctgcaatgcgcccaggacatgaaccatgagtacatgagctggtacagacaggaccccggcatgggcctgagactgatccactactctgtggctatccagaccaccgaccagggcgaagtgcccaatggctacaacgtgtccagaagcaccatcgaggacttcccactgagactgctgtctgccgctcctagccagaccagcgtgtacttttgtgccagcagctacgtgggcgataccggcgagctgttctttggcgaaggcagcagactgaccgtgggcggaggcggaagtggaggcggaggatctggcggcggaggctctcaagaagtgacacagatccctgccgctctgtctgtgcctgagggcgaaaacctggtgctgaactgctccttcaccgacagcgccatctacaacctccagtggttcagacaggaccccggcaagggactgacaagcctgctgcttattagcccctggcagagagagcagaccagcggcagactgaatgccagcctggataagtcctccggcagaagcaccctgtatatcgccgcttctcagcctggcgatagcgccacatatctgtgtgccgtcagacccctgctggacggcacatatatccccacctttggcagaggcaccagcctgatcgtgcacccctac

SEQ ID NO: 8516 - DNA, 342 bp, Artificial Sequence
  Synthetic Polynucleotide
gacggcgatagcgtgacccagacagagggactcgtgacactgaccgaaggactgcccgtgatgctgaactgcacctaccagacaatctacagcaaccccttcctgttttggtacgtgcagcacctgaacgagagccccagactgctgctgaagtccttcaccgacaacaagcggacagagcaccagggctttcacgccacactgcacaagagcagctccagcttccatctgcaaaagtctagcgcccagctgagcgacagcgccctgtactactgtgccttcgacaccaacacctacaaagtgatcttcggcaagggcacccatctgcacgtgctgcctaat

SEQ ID NO: 8517 - DNA, 402 bp, Artificial Sequence
  Synthetic Polynucleotide
atgggacctgtgacctgttctgtgctggtgctgctgctcatgctgcggagaagtaatggcgacggcgatagcgtgacccagacagagggactcgtgacactgaccgaaggactgcccgtgatgctgaactgcacctaccagacaatctacagcaaccccttcctgttttggtacgtgcagcacctgaacgagagccccagactgctgctgaagtccttcaccgacaacaagcggacagagcaccagggctttcacgccacactgcacaagagcagctccagcttccatctgcaaaagtctagcgcccagctgagcgacagcgccctgtactactgtgccttcgacaccaacacctacaaagtgatcttcggcaagggcacccatctgcacgtgctgcctaat

SEQ ID NO: 8518 - DNA, 339 bp, Artificial Sequence
  Synthetic Polynucleotide
ctggtggacatgaaagtgacccagatgcctcgctacctgattaagcggatgggcgagaacgtgctgctggaatgcggccaggatatgagccacgagacaatgtactggtacagacaggaccctggcctgggcctccagctgatctacatctcctacgacgtggacagcaacagcgagggcgacatccctaagggctacagagtgtcccggaagaagagagagcacttcagcctgatcctggacagcgccaagaccaaccagaccagcgtgtacttctgtgccagcagcagcaccaacaccgaggtgttctttggcaagggcaccagactgaccgtgctc

SEQ ID NO: 8519 - DNA, 390 bp, Artificial Sequence
  Synthetic Polynucleotide
atgagagtgcggctgatctctgccgtggtgctgtgttctctcggcaccggactggtggacatgaaagtgacccagatgcctcgctacctgattaagcggatgggcgagaacgtgctgctggaatgcggccaggatatgagccacgagacaatgtactggtacagacaggaccctggcctgggcctccagctgatctacatctcctacgacgtggacagcaacagcgagggcgacatccctaagggctacagagtgtcccggaagaagagagagcacttcagcctgatcctggacagcgccaagaccaaccagaccagcgtgtacttctgtgccagcagcagcaccaacaccgaggtgttctttggcaagggcaccagactgaccgtgctc

SEQ ID NO: 8520 - DNA, 726 bp, Artificial Sequence
  Synthetic Polynucleotide
ctggtggacatgaaagtgacccagatgcctcgctacctgattaagcggatgggcgagaacgtgctgctggaatgcggccaggatatgagccacgagacaatgtactggtacagacaggaccctggcctgggcctccagctgatctacatctcctacgacgtggacagcaacagcgagggcgacatccctaagggctacagagtgtcccggaagaagagagagcacttcagcctgatcctggacagcgccaagaccaaccagaccagcgtgtacttctgtgccagcagcagcaccaacaccgaggtgttctttggcaagggcaccagactgaccgtgctcggcggaggcggaagtggaggcggaggatctggcggcggaggctctgacggcgatagcgtgacccagacagagggactcgtgacactgaccgaaggactgcccgtgatgctgaactgcacctaccagacaatctacagcaaccccttcctgttttggtacgtgcagcacctgaacgagagccccagactgctgctgaagtccttcaccgacaacaagcggacagagcaccagggctttcacgccacactgcacaagagcagctccagcttccatctgcaaaagtctagcgcccagctgagcgacagcgccctgtactactgtgccttcgacaccaacacctacaaagtgatcttcggcaagggcacccatctgcacgtgctgcctaat

SEQ ID NO: 8521 - DNA, 351 bp, Artificial Sequence
  Synthetic Polynucleotide
ggcgtgacacagagccccacacacctgattaagaccagaggccagcaggccacactgagatgcagccctatcagcggccacaccagcgtgtactggtatcagcaggctctcggactgggcctccagttcctgctttggtacgacgagggcgaagagagaaaccggggcaacttccctcctcggttttccggcagacagttccccaactacagcagcgagctgaacgtgaacgccctggaactggaagatagcgccctgtacctgtgtgccagctctctcggcggagatgaactgggagccgatggcaacgagcagttctttggccctggcaccagactgaccgtgctggaa

SEQ ID NO: 8522 - DNA, 357 bp, Artificial Sequence
  Synthetic Polynucleotide
ggcgtgacacagagccccacacacctgattaagaccagaggccagcaggccacactgagatgcagccctatcagcggccacaccagcgtgtactggtatcagcaggctctcggactgggcctccagttcctgctttggtacgacgagggcgaagagagaaaccggggcaacttccctcctcggttttccggcagacagttccccaactacagcagcgagctgaacgtgaacgccctggaactggaagatagcgccctgtacctgtgtgcctcttctcttggtggacctcgcggactggctggactgagaggggatgagcagtttttcggccctggcaccagactgaccgtgctggaa

SEQ ID NO: 8523 - DNA, 1293 bp, Artificial Sequence
  Synthetic Polynucleotide
atgggcagttggttcgagttctacgaccggctgaatgccatcgacgccagactgtgggctctcggaggatctgaagctgagctggccgccttcgagaaagagatcgccgcctttgagagcgagctgcaagcctacaaaggcaagggcaaccccgaggtggaaaacctgagagtgcacgccgctgccatcagagaatggctccaggcttacagacacaacggcggaggcggatctggtggcggtggatctggaatgggaagctggcttgagttctaccacagactcaacgccattgacagcaggctgtgggcacttggcggaagcgaagctgaactcgccgcttttgaaaaagaaattgccgctttcgagtccgagcttcaggcttacaaaggcaaagggaatcctgaggtcgagagcctgagagatcacgctgcccacattagagagtggttgcaggcataccggcacaatggtggcggaggtagtggcggcggaggttctggaggatccggcggcggaggatctggcggaggcggatctgggggcggaggctctttcgaagacatccagatgacacagagccctagcagcctgtctgccagcgtgggagacagagtgaccatcacatgcaaggccagcgaccacatcaacaactggctggcctggtatcagcagaagcctggacaggcccctaagctgctgatctacggcgctaccacactggaaacaggcgtgcccagcagattttctggcagcggctctggcaccgactacaccctgacaatatccagcctccagcctgaggacttcgccacctactactgtcagcagagctggaacaccccttggacattcggccagggcaccaagctggaaatcaagagaggcggaggcggaagtggaggcggaggatctggcggcggaggctctcaagttcagcttcaacagcctggcgctgagctggtcaaacctggcgcttctgtgaagatgagctgcaaagccagcggctacgccttcagcagctactggatcaactggatgaagcagaaacccggccagggactcgaatggatcggccaaatctatcccggcgacggcgacaccaactacaacggcaagttcaagggcagagccacactgaccgccgatacctctagcagcacagcctacatgcagctgagcagcctgaccagcgaagatagcgccgtgtacttctgtgcccggtccatcacaacagtcgtgggctgcgctatggactattggggccagggaacaagcgtgaccgtgtctagt

SEQ ID NO: 8524 - DNA, 1008 bp, Artificial Sequence
  Synthetic Polynucleotide
atgggatcttggagcgagttctgggtccgactgggagccatcagagaaagactggatgccctcggaggaagcgaagccgaactggccgccttcgagaaagagatcgccgcctttgagagcgagctgcaagcctacaaaggcaagggcaaccccgaggtggaaaagctgagatacaccgccgctaccatccggcggtttctccaggcttacagacacaatggatccggcggcggaggatctggcggaggcggatctgggggcggaggctctttcgaagacatccagatgacacagagccctagcagcctgtctgccagcgtgggagacagagtgaccatcacatgcaaggccagcgaccacatcaacaactggctggcctggtatcagcagaagcctggacaggcccctaagctgctgatctacggcgctaccacactggaaacaggcgtgcccagcagattttctggcagcggctctggcaccgactacaccctgacaatatccagcctccagcctgaggacttcgccacctactactgtcagcagagctggaacaccccttggacattcggccagggcaccaagctggaaatcaagagaggcggaggcggaagtggaggcggaggatctggcggcggaggctctcaagttcagcttcaacagcctggcgctgagctggtcaaacctggcgcttctgtgaagatgagctgcaaagccagcggctacgccttcagcagctactggatcaactggatgaagcagaaacccggccagggactcgaatggatcggccaaatctatcccggcgacggcgacaccaactacaacggcaagttcaagggcagagccacactgaccgccgatacctctagcagcacagcctacatgcagctgagcagcctgaccagcgaagatagcgccgtgtacttctgtgcccggtccatcacaacagtcgtgggctgcgctatggactattggggccagggaacaagcgtgaccgtgtctagt

SEQ ID NO: 8525 - DNA, 1320 bp, Artificial Sequence
  Synthetic Polynucleotide
atggccttaccagtgaccgccttgctcctgccgctggccttgctgctccacgccgccaggccggcatgcgatgaaggtggcggcggatctatgggatcttggagcgagttctgggtccgactgggagccatcagagaaagactggatgccctcggaggaagcgaagccgaactggccgccttcgagaaagagatcgccgcctttgagagcgagctgcaagcctacaaaggcaagggcaaccccgaggtggaaaagctgagatacaccgccgctaccatccggcggtttctccaggcttacagacacaatggtaccggcggaggcggatcaggcggcggaggtagcggtggcggtggttctggactggaaaagtgcttccagaccgagaatcccctggaatgccaggacaagggcgaagaggaactccagaagtacatccaagagtctcaggccctggctaagagaagctgcggcctgtttcagaagctgggcgagtattacctccagaacgccttcctggtggcctacaccaagaaagcccctcagctgacaagcagcgagctgatggctatcacccggaagatggccgccacagccgctacatgttgtcagctcagcgaggacaaactgctggcctgtggcgaaggcgctgccgacatcattatcggccacctgtgcatccggcacgaaatgacccctgtgaatcctggcgtgggccagtgttgtacaagcagctacgccaacagacggccctgctttagcagcctggtggtggacgaaacctacgtgccaccagccttcagcgacgacaagttcatcttccacaaggacctgtgtcaggcccagggcgttgccctccagacaatgaagcaagagttcctgattaacctggtcaagcagaagccccagatcaccgaggaacagctggaagccgtgatcgccgatttcagcggcctgctggaaaaatgctgtcagggccaagagcaagaagtgtgcttcgccgaggaaggccagaagctgatctccaagacaagagccgctctcggcgttggaggcggaggttctggtggtggtggaagcggaggtggtggtagtgggcccatgggcagctgggatgagttcggcagaaggctgtacgccattgagtggcggctgtatgcccttggcggatctgaagctgagctggccgcttttgaaaaagaaattgccgctttcgagtccgagcttcaggcttacaaaggcaaagggaatcctgaggtcgagaaactgcgggaaatcgccgccgtgatccggtccaatctccaggcatatcggcataat

SEQ ID NO: 8526 - DNA, 219 bp, Artificial Sequence
  Synthetic Polynucleotide
atgggcagctgggaagagttcgagctgagactgaacgccatcgaggaacggctgtatgccctcggaggatctgaagccgagctggcctacttcgagtacgtgatcgccgacttcgagggcaacctgcagcggtacaaaggcaagggcaaccctgaagtggaagccctgtacttcgaggccgacgccatcttcgaggaactggtggcctacagacacaac

SEQ ID NO: 8527 - DNA, 408 bp, Artificial Sequence
  Synthetic Polynucleotide
tgcccctacagcaatcctagcctgtgttctggcggcggaggaagcgaacttcctacacagggcaccttcagcaacgtgtccaccaatgtgtccccagccaagcctaccaccaccgcctgtccttactccaatccatctctgtgcagcggaggcggcggatctcctgctcctagacctcctacaccagctcctacaatcgccagccagcctctgtctctcagacccgaagcctgtagacctgctgctggcggagctgtgcataccagaggactggatttcgcctgcgacatctacatctgggctcctctggctggcacatgtggcgttctgctgctgagcctggtcatcaccctgtactgcaaccaccggaacaggcggagagtgtgcaagtgccctagacctgtggtt

SEQ ID NO: 8528 - DNA, 471 bp, Artificial Sequence
  Synthetic Polynucleotide
atggccctgcctgtgacagctctgctgctgcctctggcactgctgctgcacgccgccagaccttgcccctacagcaatcctagcctgtgttctggcggcggaggaagcgaacttcctacacagggcaccttcagcaacgtgtccaccaatgtgtccccagccaagcctaccaccaccgcctgtccttactccaatccatctctgtgcagcggaggcggcggatctcctgctcctagacctcctacaccagctcctacaatcgccagccagcctctgtctctcagacccgaagcctgtagacctgctgctggcggagctgtgcataccagaggactggatttcgcctgcgacatctacatctgggctcctctggctggcacatgtggcgttctgctgctgagcctggtcatcaccctgtactgcaaccaccggaacaggcggagagtgtgcaagtgccctagacctgtggtt

SEQ ID NO: 8529 - DNA, 873 bp, Artificial Sequence
  Synthetic Polynucleotide
atgtaccggatgcagctgctgagctgtatcgccctgtctctggccctggtcacaaatagcgcccctaccagcagcagcaccaagaaaacccagctgcaactggaacacctcctgctggacctccagatgatcctgaacggcatcaacaactacaagaaccccaagctgacccggatgctgaccttcaagttctacatgcccaagaaggccaccgagctgaagcacctccagtgcctggaagaggaactgaagcccctggaagaagtgctgaatctggcccagagcaagaacttccacctgaggccaagggacctgatctccaacatcaacgtgatcgtgctggaactgaaaggcagcgagacaaccttcatgtgcgagtacgccgacgagacagctaccatcgtggaatttctgaatcggtggatcaccttctgccagagcatcatcagcaccctgacacatatgtgcccctacagcaatcctagcctgtgttctggcggcggaggaagcgaacttcctacacagggcaccttcagcaacgtgtccaccaatgtgtccccagccaagcctaccaccaccgcctgtccttactccaatccatctctgtgcagcggaggcggcggatctcctgctcctagacctcctacaccagctcctacaatcgccagccagcctctgtctctcagacccgaagcctgtagacctgctgctggcggagctgtgcataccagaggactggatttcgcctgcgacatctacatctgggctcctctggctggcacatgtggcgttctgctgctgagcctggtcatcaccctgtactgcaaccaccggaacaggcggagagtgtgcaagtgccctagacctgtggtt

SEQ ID NO: 8530 - DNA, 699 bp, Artificial Sequence; identical to SEQ ID NO: 7152
  Synthetic Polynucleotide

SEQ ID NO: 8531 - DNA, 900 bp, Artificial Sequence
  Synthetic Polynucleotide
atgagaatcagcaagccccacctgagatccatcagcatccagtgctacctgtgcctgctgctgaacagccactttctgacagaggccggcatccacgtgttcatcctgggctgtttttctgccggcctgcctaagaccgaggccaactgggttaacgtgatctccgacctgaagaagatcgaggacctgatccagtccatgcacatcgacgccacactgtacaccgagagcgacgtgcaccctagctgtaaagtgaccgccatgaagtgctttctgctggaactgcaagtgatctccctggaaagcggcgacgccagcatccacgacaccgtggaaaacctgattatcctggctaacaacagcctgagcagcaacggcaacgtgaccgagtccggctgtaaagagtgcgaggaactggaagagaagaatatcaaagagttcctccagagcttcgtgcacatcgtgcagatgttcatcaacaccagccatatgtgcccctacagcaatcctagcctgtgttctggcggcggaggaagcgaacttcctacacagggcaccttcagcaacgtgtccaccaatgtgtccccagccaagcctaccaccaccgcctgtccttactccaatccatctctgtgcagcggaggcggcggatctcctgctcctagacctcctacaccagctcctacaatcgccagccagcctctgtctctcagacccgaagcctgtagacctgctgctggcggagctgtgcataccagaggactggatttcgcctgcgacatctacatctgggctcctctggctggcacatgtggcgttctgctgctgagcctggtcatcaccctgtactgcaaccaccggaacaggcggagagtgtgcaagtgccctagacctgtggtt

SEQ ID NO: 8532 - DNA, 900 bp, Artificial Sequence
  Synthetic Polynucleotide
atgagaatcagcaagccccacctgagatccatcagcatccagtgctacctgtgcctgctgctgaacagccactttctgacagaggccggcatccacgtgttcatcctgggctgtttttctgccggcctgcctaagaccgaggccaactgggttaacgtgatctccgacctgaagaagatcgaggacctgatccagtccatgcacatcgacgccacactgtacaccgagagcgacgtgcaccctagctgtaaagtgaccgccatgaagtgctttctgctggaactgcaagtgatctccctggaaagcggcgacgccagcatccacgacaccgtgaagaacctgattatcctggctaacaacagcctgagcagcaacggcaacgtgaccgagtccggctgtaaagagtgcgaggaactggaagagaagaatatcaaagagttcctccagagcttcgtgcacatcgtgcagatgttcatcaacaccagccatatgtgcccctacagcaatcctagcctgtgttctggcggcggaggaagcgaacttcctacacagggcaccttcagcaacgtgtccaccaatgtgtccccagccaagcctaccaccaccgcctgtccttactccaatccatctctgtgcagcggaggcggcggatctcctgctcctagacctcctacaccagctcctacaatcgccagccagcctctgtctctcagacccgaagcctgtagacctgctgctggcggagctgtgcataccagaggactggatttcgcctgcgacatctacatctgggctcctctggctggcacatgtggcgttctgctgctgagcctggtcatcaccctgtactgcaaccaccggaacaggcggagagtgtgcaagtgccctagacctgtggtt

SEQ ID NO: 8533 - DNA, 1005 bp, Artificial Sequence
  Synthetic Polynucleotide
atgtaccggatgcagctgctgagctgtatcgccctgtctctggccctggtcacaaatagcgcccctaccagcagcagcaccaagaaaacccagctgcaactggaacacctcctgctggacctccagatgatcctgaacggcatcaacaactacaagaaccccaagctgacccggatgctgaccttcaagttctacatgcccaagaaggccaccgagctgaagcacctccagtgcctggaagaggaactgaagcccctggaagaagtgctgaatctggcccagagcaagaacttccacctgaggccaagggacctgatctccaacatcaacgtgatcgtgctggaactgaaaggcagcgagacaaccttcatgtgcgagtacgccgacgagacagctaccatcgtggaatttctgaatcggtggatcaccttctgccagagcatcatcagcaccctgacacatatggcctgccatcagctgtgtgccagaggacactgttggggacctggacctacacagtgcgtgaactgctcccagttcctgagaggccaagagtgcgtggaagagtgcagagtgctgcaaggactgccccgcgagtatgtgaacgccagacactgtctgccttgtcaccctgagtgccagcctcagaatggcagcgtgacctgttttggccctgaggccgatcagtgtgtggcctgcgctcactataaggaccctccattctgcgtggcccggtgtccttctggcgtgaagcctgatctgagctacatgcccatctggaagttccccgacgaggaaggcgcttgccagccttgtcctatcaactgcacccacagctgcgtggacctggatgataagggatgtcccgccgagcagagagcctctcctctgacctctatcatctctgccgtcgtgggcatcctgctggtggtggttctgggcgttgtgttcggcatcctgattaagcggcggcagcagaagatccgcaagtacaccatgagataa

SEQ ID NO: 8534 - DNA, 603 bp, Artificial Sequence
  Synthetic Polynucleotide
atggccttaccagtgaccgccttgctcctgccgctggccttgctgctccacgccgccaggccggcctgccatcagctgtgtgccagaggacactgttggggacctggacctacacagtgcgtgaactgctcccagttcctgagaggccaagagtgcgtggaagagtgcagagtgctgcaaggactgccccgcgagtatgtgaacgccagacactgtctgccttgtcaccctgagtgccagcctcagaatggcagcgtgacctgttttggccctgaggccgatcagtgtgtggcctgcgctcactataaggaccctccattctgcgtggcccggtgtccttctggcgtgaagcctgatctgagctacatgcccatctggaagttccccgacgaggaaggcgcttgccagccttgtcctatcaactgcacccacagctgcgtggacctggatgataagggatgtcccgccgagcagagagcctctcctctgacctctatcatctctgccgtcgtgggcatcctgctggtggtggttctgggcgttgtgttcggcatcctgattaagcggcggcagcagaagatccgcaagtacaccatgagataa

SEQ ID NO: 8535 - DNA, 282 bp, Artificial Sequence; identical to SEQ ID NO: 1167
  Synthetic Polynucleotide

SEQ ID NO: 8536 - DNA, 282 bp, Artificial Sequence
  Synthetic Polynucleotide
atccagaaccctgatcctgccgtgtaccagctgcgggatagcaagagcagcgacaagagcgtgtgtctgttcaccgacttcgacagccagaccaacgtgtcccagagcaaggactccgacgtgtacatcaccgataagtgcgtgctggacatgcggagcatggacttcaagagcaactccgccgtggcctggtccaacaagtccgatttcgcctgcgccaacgccttcaacaacagcattatccccgaggacacattcttcccaagcagcgacgtgccctgc

SEQ ID NO: 8537 - DNA, 282 bp, Artificial Sequence
  Synthetic Polynucleotide
atccagaaccctgatcctgccgtgtaccagctgcgggatagcaagagcagcgacaagagcgtgtgtctgttcaccgacttcgacagccagaccaacgtgtcccagagcaaggactccgacgtgtacatcaccgataagtgcgtgctggacatgcggagcatggacttcaagagcaactccgccgtggcctggtccaacaagtccgatttcgcctgcgccaacgccttcaacaacagcattatccccgaggacacattcttcccaagccccgagagcagctgc

SEQ ID NO: 8538 - DNA, 396 bp, Artificial Sequence
  Synthetic Polynucleotide
gaggacctgaagaacgtgttcccacctgaggtggccgtgttcgagcctagcgaggccgagatcagccacacccagaaagccaccctcgtgtgcctggctaccggcttctaccccgaccatgtggaactgtcttggtgggtcaacggcaaagaggtgcacagcggcgtgtctaccgacccccagccactgaaagaacagcccgccctgaacgacagccggtactgcctgagcagcagactgagagtgtccgccaccttctggcagaacccccggaaccacttcagatgccaggtgcagttctacggcctgagcgagaacgacgagtggacccaggacagagccaagcccgtgacccagatcgtgtctgccgaagcctggggcagagccgattgcgga

SEQ ID NO: 8539 - DNA, 393 bp, Artificial Sequence
  Synthetic Polynucleotide
gaggacctgaagaacgtgttcccacctgaggtggccgtgttcgagcctagcaaggccgagatcgcccacacccagaaagccaccctcgtgtgcctggctaccggcttctaccccgaccatgtggaactgtcttggtgggtcaacggcaaagaggtgcacagcggcgtgtgtaccgacccccagccactgaaagaacagcccgccctgaacgacagccggtactgcctgagcagcagactgagagtgtccgccaccttctggcagaacccccggaaccacttcagatgccaggtgcagttctacggcctgagcgagaacgacgagtggacccaggacagagccaagcccgtgacccagatcgtgtctgccgaagcctggggcagagccgattgc

SEQ ID NO: 8540 - DNA, 393 bp, Artificial Sequence
  Synthetic Polynucleotide
gaggacctgaagaacgtgttcccacctgaggtggccgtgttcgagcctagcgaggccgagatcagccacacccagaaagccaccctcgtgtgcctggctaccggcttctaccccgaccatgtggaactgtcttggtgggtcaacggcaaagaggtgcacagcggcgtgtgtaccgacccccagccactgaaagaacagcccgccctgaacgacagccggtactgcctgagcagcagactgagagtgtccgccaccttctggcagaacccccggaaccacttcagatgccaggtgcagttctacggcctgagcgagaacgacgagtggacccaggacagagccaagcccgtgacccagatcgtgtctgccgaagcctggggcagagccgattgc

SEQ ID NO: 8541 - DNA, 714 bp, Artificial Sequence; identical to SEQ ID NO: 1415
  Synthetic Polynucleotide

SEQ ID NO: 8542 - DNA, 714 bp, Artificial Sequence; identical to SEQ ID NO: 1417
  Synthetic Polynucleotide

SEQ ID NO: 8543 - DNA, 651 bp, Artificial Sequence
  Synthetic Polynucleotide
ggaatgaggactgaggatcttcccaaagctgtcgtctttctcgaaccccaatggtattctgtgctcgaaaaagactctgtgacactgaaatgccaaggggcctactctcccgaggacaactccacacagtggtttcataatgagaacctcatcagctctcaggccagctcttatttcattgatgccgctacagtgaacgactccggcgagtatcggtgtcagaccaatctgtctacactgtctgaccccgtgcagcttgaggtccacattggatggttgctcttgcaagccccacgctgggttttcaaagaggaagatccaatccatctgcggtgccacagctggaaaaacaccgctctccacaaagtcacatacctgcaaaatggcaaagaccgcaaatacttccatcacaattccgattttcacattccgaaggctaccctgaaagacagcggcagctatttctgccggggactcgtcggctccaagaatgtgtcctccgaaaccgtgaatatcacgattacccaaggactggctgtgtctacaatctctagcttctctccgcctggataccaagtctccttctgtcttgtgatggtcctcctgtttgctgtggacacaggactgtacttttccgtgaaaacgaacatc

SEQ ID NO: 8544 - DNA, 549 bp, Artificial Sequence; identical to SEQ ID NO: 1375
  Synthetic Polynucleotide

SEQ ID NO: 8545 - DNA, 765 bp, Artificial Sequence; identical to SEQ ID NO: 1389
  Synthetic Polynucleotide

SEQ ID NO: 8546 - DNA, 849 bp, Artificial Sequence; identical to SEQ ID NO: 1405
  Synthetic Polynucleotide

SEQ ID NO: 8547 - DNA, 981 bp, Artificial Sequence
  Synthetic Polynucleotide
catgagggagtccacagaaaaccttccctcctggcccacccaggtcgcctggtgaaatcagaagagacagtcatcctgcagtgttggtcagatgtcatgtttgaacacttccttctgcacagagaggggatgtttaacgacactttgcgcctcattggagaacaccatgatggggtctccaaggccaacttctccatcagtcgcatgacgcaagacctggcagggacctacagatgctacggttctgttactcactccccctatcaggtgtcagctcccagtgaccctctggacatcgtgatcataggtctatatgagaaaccttctctctcagcccagctgggccccacggttctggcaggagagaatgtgaccttgtcctgcagctcccggagctcctatgacatgtaccatctatccagggaaggggaggcccatgaacgtaggctccctgcagggcccaaggtcaacggaacattccaggctgactttcctctgggccctgccacccacggagggacctacagatgcttcggctctttccatgactctccatacgagtggtcaaagtcaagtgacccactgcttgtttctgtcacaggaaacccttcaaatagttggccttcacccactgaaccaagctccaaaaccggtaacccccgacacctgcacattctgattgggacctcagtggtcatcatcctcttcatcctcctcttctttctccttcatcgctggtgctccaacaaaaaaaatgctgcggtaatggaccaagagtctgcaggaaacagaacagcgaatagcgaggactctgatgaacaagaccctcaggaggtgacatacacacagttgaatcactgcgttttcacacagagaaaaatcactcgcccttctcagaggcccaagacacccccaacagatatcatcgtgtacacggaacttccaaatgctgagtccagatccaaagttgtctcctgccca

SEQ ID NO: 8548 - DNA, 981 bp, Artificial Sequence
  Synthetic Polynucleotide
catgagggagtccacagaaaaccttccctcctggcccacccaggtcgcctggtgaaatcagaagagacagtcatcctgcaatgttggtcagatgtcaggtttgagcacttccttctgcacagagaagggaagtttaaggacactttgcacctcattggagagcaccatgatggggtctccaaagccaacttctccatcggtcccatgatgcaagaccttgcagggacctacagatgctacggttctgttactcactccccctatcagttgtcagctcccagtgaccctctggacatcgtcatcacaggtctatatgagaaaccttctctctcagcccagccgggccccacggttctggcaggagagagcgtgaccttgtcctgcagctcccggagctcctatgacatgtaccatctatccagggagggggaggcccatgaatgtaggttctctgcagggcccaaggtcaacggaacattccaggccgactttcctctgggccctgccacccacggaggaacctacagatgcttcggctctttccgtgactctccatacgagtggtcaaactcgagtgacccactgcttgtttctgtcacaggaaacccttcaaatagttggccttcacccactgaaccaagctctaaaaccggtaacccccgacacctgcacattctgattgggacctcagtggtcatcatcctcttcatcctcctcttctttctccttcatcgctggtgctccaacaaaaaaaatgctgcggtaatggaccaagagtctgcagggaacagaacagcgaatagcgaggactctgatgaacaagaccctcaggaggtgacatacacacagttgaatcactgcgttttcacacagagaaaaatcactcgcccttctcagaggcccaagacacccccaacagatatcatcgtgtacacggaacttccaaatgctgagtccagatccaaagttgtctcctgccca

SEQ ID NO: 8549 - DNA, 960 bp, Artificial Sequence
  Synthetic Polynucleotide
catgagggagtccacagaaaaccttccctcctggcccacccaggtcccctggtgaaatcagaagagacagtcatcctgcaatgttggtcagatgtcaggtttcagcacttccttctgcacagagaagggaagtttaaggacactttgcacctcattggagagcaccatgatggggtctccaaggccaacttctccatcggtcccatgatgcaagaccttgcagggacctacagatgctacggttctgttactcactccccctatcagttgtcagctcccagtgaccctctggacatcgtcatcacaggtctatatgagaaaccttctctctcagcccagccgggccccacggttctggcaggagagagcgtgaccttgtcctgcagctcccggagctcctatgacatgtaccatctatccagggagggggaggcccatgaacgtaggttctctgcagggcccaaggtcaacggaacattccaggccgactttcctctgggccctgccacccacggaggaacctacagatgcttcggctctttccgtgactctccatacgagtggtcaaactcgagtgacccactgcttgtttctgtcacaggaaacccttcaaatagttggccttcacccactgaaccaagctccgaaaccggtaaccccagacacctgcatgttctgattgggacctcagtggtcatcatcctcttcatcctcctcctcttctttctccttcatcgctggtgctgcaacaaaaaaaatgctgttgtaatggaccaagagcctgcagggaacagaacagtgaacagggaggactctgatgaacaagaccctcaggaggtgacatatgcacagttgaatcactgcgttttcacacagagaaaaatcactcgcccttctcagaggcccaagacacccccaacagatatcatcgtgtacacggaacttccaaatgctgagccc

SEQ ID NO: 8550 - DNA, 1062 bp, Artificial Sequence
  Synthetic Polynucleotide
catgagggtggtcaggacaagcccttgctgtctgcctggcccagcgctgtggtgcctcgaggaggacatgtgactcttctgtgtcgctctcgtcttgggtttaccatcttcagtctgtacaaagaagatggggtgcctgtccctgagctctacaacaaaatattctggaagagcatcctcatgggccctgtgacccctgcacacgcagggacctacagatgtcggggttcacacccacgctcccccattgagtggtcagcacccagcaaccccctggtgatcgtggtcacaggtctatttgggaaaccttcactctcagcccagccgggccccacggttcgcacaggagagaacgtgaccttgtcctgcagctccaggagctcatttgacatgtaccatctatccagggaggggagggcccatgaacctaggctccctgcagtgcccagcgtcaatggaacattccaggctgactttcctctgggccctgccacccacggagggacctacacatgcttcggctctctccatgactcaccctatgagtggtcagacccgagtgacccactgcttgtttctgtcacaggaaactcttcaagtagttcatcttcacccactgaaccaagctccaaaactggtatccgcagacacctgcacattctgattgggacctcagtggctatcatcctcttcatcatcctcttcttctttctccttcattgctgctgctccaacaaaaagaatgctgctgtaatggaccaagagcctgccggggacagaacagtgaacagggaggactctgatgatcaagaccctcaggaggtgacatatgcacagttggatcactgcgttttcacacagacaaaaatcacttccccttctcagaggcccaagacacctccaacagataccaccatgtacatggaacttccaaatgctaagccaagatcattgtctcctgcccataagcaccacagtcaggccttgaggggatcttctagggagacaacagccctgtctcaaaaccgggttgctagctcccatgtaccagcagctggaatc

SEQ ID NO: 8551 - DNA, 1062 bp, Artificial Sequence
  Synthetic Polynucleotide
catgagggtggacaggacaagcccttgctgtctgcctggcccagcgctgtggtgcctcgaggaggacatgtgactcttctgtgtcgctctcgtcttgggtttaccatcttcagtctgtacaaagaagatggggtgcctgtccctgagctctacaacaaaatattctggaagagcatcctcatgggccctgtgacccctgcacacgcagggacctacagatgtcggggttcacacccgcgctcccccattgagtggtcggcacccagcaaccccctggtgatcgtggtcacaggtctatttgggaaaccttcactctcagcccagccgggccccacggttcgcacaggagagaacgtggccttgtcctgcagctccaggagctcatttgacatgtaccatctatccagggaggggagggcccatgaacctaggctccctgcagtgcccagcgtcgatggaacattccaggctgactttcctctgggccctgccacccacggagggacctacacatgcttcagctctctccatgactcaccctatgagtggtcagacccgagtgacccactgcttgtttctgtcacaggaaactcttcaagtagttcatcttcacccactgaaccaagctccaaaactggtatccgcagacacctgcacattctgattgggacctcagtggctatcatcctcttcatcatcctcttcttctttctccttcattgctgctgctccaacaaaaagaatgctgctgtaatggaccaagggcctgccggggacagaacagtgaacagggaggactctgatgatcaagaccctcaggaggtgacatatgcacagttggatcactgcgttttcacacagacaaaaatcacttccccttctcagaggcccaaggcacctccaacagataccaccatgtacatggaacttccaaatgctaagccaagatcattgtctcctgcccataagcaccacagtcaggccttgaggggatcttctagggagacaacagccctgtctcaaaaccgggttgctagctcccatgtaccagcagctggaatc

SEQ ID NO: 8552 - DNA, 1278 bp, Artificial Sequence
  Synthetic Polynucleotide
gccggtccacacgtgggtggtcaggacaagcccttcctgtctgcctggcccagcgctgtggtgcctcgaggaggacacgtgactcttcggtgtcactatcgtcataggtttaacaatttcatgctatacaaagaagacagaatccacgttcccatcttccatggcagattattccaggagagcttcaacatgagccctgtgaccacagcacatgcagggaactacacatgtcggggttcacacccacactcccccactgggtggtcggcacccagcaaccccgtggtgatcatggtcacaggaaaccacagaaaaccttccctcctggcccacccaggtcccctggtgaaatcaggagagagagtcatcctgcaatgttggtcagatatcatgtttgagcacttctttctgcacaaagaggggatctctaaggacccctcacgcctcgttggacagatccatgatggggtctccaaggccaatttctccatcggtcccatgatgcttgcccttgcagggacctacagatgctacggttctgttactcacaccccctatcagttgtcagctcccagtgatcccctggacatcgtggtcacaggtccatatgagaaaccttctctctcagcccagccgggccccaaggttcaggcaggagagagcgtgaccttgtcctgcagctcccggagctcctatgacatgtaccatctatccagggaggggggagcccatgaacgtaggctccctgcagtgcgcaaggtcaacagaacattccaggcagatttccctctgggccctgccacccacggagggacctacagatgcttcggctctttccgtcactctccctacgagtggtcagacccgagtgacccactgcttgtttctgtcacaggaaacccttcaagtagttggccttcacccacagaaccaagctccaaatctggtaaccccagacacctgcacattctgattgggacctcagtggtcatcatcctcttcatcctcctcctcttctttctccttcatctctggtgctccaacaaaaaaaatgctgctgtaatggaccaagagcctgcagggaacagaacagccaacagcgaggactctgatgaacaagaccctgaggaggtgacatacgcacagttggatcactgcgttttcacacagagaaaaatcactcgcccttctcagaggcccaagacaccccctacagataccatcttgtacacggaacttccaaatgctaagcccagatccaaagttgtctcctgccca

SEQ ID NO: 8553 - DNA, 1251 bp, Artificial Sequence
  Synthetic Polynucleotide
ctcatgggtggtcaggacaaacccttcctgtctgcccggcccagcactgtggtgcctcgaggaggacacgtggctcttcagtgtcactatcgtcgtgggtttaacaatttcatgctgtacaaagaagacagaagccacgttcccatcttccacggcagaatattccaggagagcttcatcatgggccctgtgaccccagcacatgcagggacctacagatgtcggggttcacgcccacactccctcactgggtggtcggcacccagcaaccccctggtgatcatggtcacaggaaaccacagaaaaccttccctcctggcccacccagggcccctgctgaaatcaggagagacagtcatcctgcaatgttggtcagatgtcatgtttgagcacttctttctgcacagagaggggatctctgaggacccctcacgcctcgttggacagatccatgatggggtctccaaggccaacttctccatcggtcccttgatgcctgtccttgcaggaacctacagatgttatggttctgttcctcactccccctatcagttgtcagctcccagtgaccccctggacatcgtgatcacaggtctatatgagaaaccttctctctcagcccagccgggccccacggttcaggcaggagagaacgtgaccttgtcctgtagctcctggagctcctatgacatctaccatctgtccagggaaggggaggcccatgaacgtaggctccgtgcagtgcccaaggtcaacagaacattccaggcagactttcctctgggccctgccacccacggagggacctacagatgcttcggctctttccgtgccctgccctgcgtgtggtcaaactcaagtgacccactgcttgtttctgtcacaggtatctgcagacacctgcatgttctgattgggacctcagtggtcatcttcctcttcatcctcctcctcttctttctcctttatcgctggtgctccaacaaaaagaatgctgctgtaatggaccaagagcctgcgggggacagaacagtgaataggcaggactctgatgaacaagaccctcaggaggtgacgtacgcacagttggatcactgcgttttcatacagagaaaaatcagtcgcccttctcagaggcccaagacacccctaacagataccagcgtgtacacggaacttccaaatgctgagcccagatccaaagttgtctcctgcccacgagcaccacagtcaggtcttgagggggttttc

SEQ ID NO: 8554 - DNA, 1302 bp, Artificial Sequence
  Synthetic Polynucleotide
ctcatgggtggtcaggacaaacccttcctgtctgcccggcccagcactgtggtgcctcgaggaggacacgtggctcttcagtgtcactatcgtcgtgggtttaacaatttcatgctgtacaaagaagacagaagccacgttcccatcttccacggcagaatattccaggagagcttcatcatgggccctgtgaccccagcacatgcagggacctacagatgtcggggttcacgcccacactccctcactgggtggtcggcacccagcaaccccctggtgatcatggtcacaggaaaccacagaaaaccttccctcctggcccacccagggcccctgctgaaatcaggagagacagtcatcctgcaatgttggtcagatgtcatgtttgagcacttctttctgcacagagaggggatctctgaggacccctcacgcctcgttggacagatccatgatggggtctccaaggccaacttctccatcggtcccttgatgcctgtccttgcaggaacctacagatgttatggttctgttcctcactccccctatcagttgtcagctcccagtgaccccctggacatcgtgatcacaggtctatatgagaaaccttctctctcagcccagccgggccccacggttcaggcaggagagaacgtgaccttgtcctgtagctcctggagctcctatgacatctaccatctgtccagggaaggggaggcccatgaacgtaggctccgtgcagtgcccaaggtcaacagaacattccaggcagactttcctctgggccctgccacccacggagggacctacagatgcttcggctctttccgtgccctgccctgcgtgtggtcaaactcaagtgacccactgcttgtttctgtcacaggaaacccttcaagtagttggccttcacccacagaaccaagctccaaatctggtatctgcagacacctgcatgttctgattgggacctcagtggtcatcttcctcttcatcctcctcctcttctttctcctttatcgctggtgctccaacaaaaagaatgctgctgtaatggaccaagagcctgcgggggacagaacagtgaataggcaggactctgatgaacaagaccctcaggaggtgacgtacgcacagttggatcactgcgttttcatacagagaaaaatcagtcgcccttctcagaggcccaagacacccctaacagataccagcgtgtacacggaacttccaaatgctgagcccagatccaaagttgtctcctgcccacgagcaccacagtcaggtcttgagggggttttc

SEQ ID NO: 8555 - DNA, 1155 bp, Artificial Sequence
  Synthetic Polynucleotide
caggacaagcccttcctctctgcctggcccggcactgtggtgtctgaaggacaacatgtgactcttcagtgtcgctctcgtcttgggtttaatgaattcagtctgtccaaagaagacgggatgcctgtccctgagctctacaacagaatattccggaacagctttctcatgggccctgtgaccccagcacatgcagggacctacagatgttgcagttcacacccacactcccccactgggtggtcggcacccagcaaccctgtggtgatcatggtcacaggagtccacagaaaaccttccctcctggcccacccaggtcccctggtgaaatcaggagagacggtcatcctgcaatgttggtcagatgtcaggtttgagcgcttccttctgcacagagaggggatcactgaggaccccttgcgcctcgttggacagctccacgatgcgggttcccaggtcaactattccatgggtcccatgacacctgcccttgcagggacctacagatgctttggttctgtcactcacttaccctatgagttgtcggctcccagtgaccctctggacatcgtggtcgtaggtctatatgggaaaccttctctctcagcccagccgggccccacggttcaggcaggagagaatgtgaccttgtcctgcagctcccggagcttgtttgacatttaccatctatccagggaggcggaggccggtgaacttaggctcactgcagtgctgagggtcaatggaacattccaggccaacttccctctgggccctgtgacccacggagggaactacagatgcttcggctctttccgtgccctgccccatgcgtggtcagacccgagtgacccactgcccgtttctgtcacaggtaactccagaaacctgcacgttctgattgggacctcagtggtcatcatcccctttgctatcctcctcttctttctccttcatcgctggtgtgccaacaaaaagaatgctgttgtaatggaccaagagcctgcagggaacagaacagtgaacagggaggactctgatgaacaagaccctcaggaggtgacatacgcacagttgaatcactgcgttttcacacagagaaaaatcactcgcccttctcagaggcccaagacacccccaacagataccagcgtg

SEQ ID NO: 8556 - DNA, 1068 bp, Artificial Sequence
  Synthetic Polynucleotide
tgggcacacgtgggtggtcaggacaagcccttctgctctgcctggcccagcgctgtggtgcctcaaggaggacacgtgactcttcggtgtcactatcgtcgtgggtttaacatcttcacgctgtacaagaaagatggggtccctgtccctgagctctacaacagaatattctggaacagtttcctcattagccctgtgaccccagcacacgcagggacctacagatgtcgaggttttcacccgcactcccccactgagtggtcggcacccagcaaccccctggtgatcatggtcacaggtctatatgagaaaccttcgcttacagcccggccgggccccacggttcgcgcaggagagaacgtgaccttgtcctgcagctcccagagctcctttgacatctaccatctatccagggagggggaagcccatgaacttaggctccctgcagtgcccagcatcaatggaacattccaggccgacttccctctgggtcctgccacccacggagagacctacagatgcttcggctctttccatggatctccctacgagtggtcagacccgagtgacccactgcctgtttctgtcacaggaaacccttctagtagttggccttcacccactgaaccaagcttcaaaactggtatcgccagacacctgcatgctgtgattaggtactcagtggccatcatcctctttaccatccttcccttctttctccttcatcgctggtgctccaaaaaaaaaaatgctgctgtaatgaaccaagagcctgcgggacacagaacagtgaacagggaggactctgatgaacaagaccctcaggaggtgacatacgcacagttggatcactgcattttcacacagagaaaaatcactggcccttctcagaggagcaagagaccctcaacagataccagcgtgtgtatagaacttccaaatgctgagcccagagcgttgtctcctgcccatgagcaccacagtcaggccttgatgggatcttctagggagacaacagccctgtctcaaacccagcttgccagctctaatgtaccagcagctggaatc

SEQ ID NO: 8557 - DNA, 756 bp, Artificial Sequence
  Synthetic Polynucleotide
tgggcacacgtgggtggtcaggacaagcccttctgctctgcctggcccagcgctgtggtgcctcaaggaggacacgtgactcttcggtgtcactatcgtcgtgggtttaacatcttcacgctgtacaagaaagatggggtccctgtccctgagctctacaacagaatattctggaacagtttcctcattagccctgtgaccccagcacacgcagggacctacagatgtcgaggttttcacccgcactcccccactgagtggtcggcacccagcaaccccctggtgatcatggtcacaggtctatatgagaaaccttcgcttacagcccggccgggccccacggttcgcgcaggagagaacgtgaccttgtcctgcagctcccagagctcctttgacatctaccatctatccagggagggggaagcccatgaacttaggctccctgcagtgcccagcatcaatggaacattccaggccgacttccctctgggtcctgccacccacggagagacctacagatgcttcggctctttccatggatctccctacgagtggtcagacccgagtgacccactgcctgtttctgtcacaggaaacccttctagtagttggccttcacccactgaaccaagcttcaaaactggtatcgccagacacctgcatgctgtgattaggtactcagtggccatcatcctctttaccatccttcccttctttctccttcatcgctggtgctccaaaaaaaaaatgctgctg

SEQ ID NO: 8558 - DNA, 852 bp, Artificial Sequence
  Synthetic Polynucleotide
catgagggagtccacagaaaaccttccctcctggcccacccaggtcgcctggtgaaatcagaagagacagtcatcctgcaatgttggtcagatgtcatgtttgaacacttccttctgcacagagaggggatgtttaacgacactttgcgcctcattggagaacaccatgatggggtctccaaggccaacttctccatcagtcgcatgaagcaagacctggcagggacctacagatgctacggttctgttactcactccccctatcagttgtcagctcccagtgaccctctggacatcgtgatcataggtctatatgagaaaccttctctctcagcccagccgggccccacggttctggcaggagagaatgtgaccttgtcctgcagctcccggagctcctatgacatgtaccatctatccagggaaggggaggcccatgaacgtaggctccctgcagggaccaaggtcaacggaacattccaggccaactttcctctgggccctgccacccatggagggacctacagatgcttcggctctttccgtgactctccatacgagtggtcaaagtcaagtgacccactgcttgtttctgtcacaggaaacccttcaaatagttggccttcacccactgaaccaagctccgaaaccggtaaccccagacacctacatgttctgattgggacctcagtggtcaaaatccctttcaccatcctcctcttctttctccttcatcgctggtgctccgacaaaaaaaatgctgctgtaatggaccaagagcctgcagggaacagaacagtgaacagcgaggattctgatgaacaagaccatcaggaggtgtcatacgcataa

SEQ ID NO: 8559 - DNA, 849 bp, Artificial Sequence
  Synthetic Polynucleotide
catgagggagtccacagaaaaccttccctcctggcccacccaggtcccctggtgaaatcagaagagacagtcatcctgcaatgttggtcagatgtcaggtttgagcacttccttctgcacagagaggggaagtataaggacactttgcacctcattggagagcaccatgatggggtctccaaggccaacttctccatcggtcccatgatgcaagaccttgcagggacctacagatgctacggttctgttactcactccccctatcagttgtcagctcccagtgaccctctggacatcgtcatcacaggtctatatgagaaaccttctctctcagcccagccgggccccacggttttggcaggagagagcgtgaccttgtcctgcagctcccggagctcctatgacatgtaccatctatccagggagggggaggcccatgaacgtaggttctctgcagggcccaaggtcaacggaacattccaggccgactttcctctgggccctgccacccacggaggaacctacagatgcttcggctctttccgtgactctccctatgagtggtcaaactcgagtgacccactgcttgtttctgtcacaggaaacccttcaaatagttggccttcacccactgaaccaagctccaaaaccggtaaccccagacacctgcatgttctgattgggacctcagtggtcaaaatccctttcaccatcctcctcttctttctccttcatcgctggtgctccaacaaaaaaaatgctgctgtaatggaccaagagcctgcagggaacagaacagtgaacagcgaggattctgatgaacaagaccatcaggaggtgtcatacgca

SEQ ID NO: 8560 - DNA, 849 bp, Artificial Sequence
  Synthetic Polynucleotide
catgagggattccgcagaaaaccttccctcctggcccacccaggtcgcctggtgaaatcagaagagacagtcatcctgcaatgttggtcagatgtcatgtttgagcacttccttctgcacagagaggggacgtttaacgacactttgcgcctcattggagagcacattgatggggtctccaaggccaacttctccatcggtcgcatgaggcaagacctggcagggacctacagatgctacggttctgttcctcactccccctatcagttttcagctcccagtgaccctctggacatcgtgatcacaggtctatatgagaaaccttctctctcagcccagccgggccccacggttctggcaggagagagcgtgaccttgtcctgcagctcctggagctcctatgacatgtaccatctatccacggagggggaggcccatgaacgtaggttctctgcagggcccaaggtcaacggaacattccaggccgactttcctctgggccctgccacccaaggaggaacctacagatgcttcggctctttccatgactctccctacgagtggtcaaagtcaagtgacccactgcttgtttctgtcacaggaaacccttcaaatagttggccttcacccactgaaccaagctccaaaaccggtaaccccagacacctacacgttctgattgggacctcagtggtcaaactccctttcaccatcctcctcttctttctccttcatcgctggtgctccgacaaaaaaaatgcatctgtaatggaccaagggcctgcggggaacagaacagtgaacagggaggattctgacgaacaggaccatcaggaggtgtcatacgca

SEQ ID NO: 8561 - DNA, 849 bp, Artificial Sequence
  Synthetic Polynucleotide
caagagggcgtgcacagaaagcccagctttctggctctgcctggacacctggtcaagagcgaagagacagtgatcctccagtgttggagcgacgtgatgttcgagcactttctgctgcacagagagggcaagttcaacaacaccctgcacctgatcggcgagcaccatgatggcgtgtccaaggccaatttcagcatcggccccatgatgcctgtgctggccggcacctatagatgctacggatctgtgcctcacagcccctaccagctgtctgccccttctgaccctctggacatggttatcatcggcctgtacgagaagcccagcctgtctgctcaacctggacctacagttcaggccggcgagaacgtgacactgagctgtagcagcagatccagctacgacatgtaccacctgagcagagaaggcgaggcccacgaacgtagacttccagccgtgcggagcatcaacggcaccttccaggccgattttccactgggacctgccacacacggcggcacatacagatgcttcggcagcttcagagatgccccttacgagtggtccaacagcagcgatcctctgctggtgtccgtgaccggcaatcccagcaatagctggccctctccaacagagcccagcagcaagacaggcaaccccagacatctgcacgtgctgatcggaaccagcgtggtcaagatcccctttacaatcctgctgttctttctgctccatcggtggtgcagcgacaagaaaaacgccgccgtgatggaccaagagcctgccggcaatagaaccgtgaacagcgaggatagcgacgagcaggaccaccaagaggtgtcctatgct

SEQ ID NO: 8562 - DNA, 852 bp, Artificial Sequence
  Synthetic Polynucleotide
catgagggattccgcagaaaaccttccctcctggcccacccaggtcccctggtgaaatcagaagagacagtcatcctgcaatgttggtcagatgtcatgtttgagcacttccttctgcacagagaggggacgtttaaccacactttgcgcctcattggagagcacattgatggggtctccaagggcaacttctccatcggtcgcatgacacaagacctggcagggacctacagatgctacggttctgttactcactccccctatcagttgtcagcgcccagtgaccctctggacatcgtgatcacaggtctatatgagaaaccttctctctcagcccagccgggccccacggttctggcaggagagagcgtgaccttgtcctgcagctcccggagctcctatgacatgtaccatctatccagggaaggggaggcccatgaacgtaggctccctgcagggcccaaggtcaacagaacattccaggccgactttcctctggaccctgccacccacggagggacctacagatgcttcggctctttccgtgactctccatacgagtggtcaaagtcaagtgacccactgcttgtttctgtcacaggaaactcttcaaatagttggccttcacccactgaaccaagctccgaaaccggtaaccccagacacctacacgttctgattgggacctcagtggtcaaactccctttcaccatcctcctcttctttctccttcatcgctggtgctccaacaaaaaaaatgcatctgtaatggaccaagggcctgcggggaacagaacagtgaacagggaggattctgatgaacaggaccatcaggaggtgtcatacgcataa

SEQ ID NO: 8563 - DNA, 1092 bp, Artificial Sequence
  Synthetic Polynucleotide
gccggtccacacatgggtggtcaggacaagcccttcctgtctgcctggcccagcgctgtggtgcctcgcggaggacacgtgactcttcggtgtcactatcgtcataggtttaacaatttcatgctatacaaagaagacagaatccacgttcccatcttccatggcagaatattccaggagggcttcaacatgagccctgtgaccacagcacatgcagggaactacacatgtcggggttcacacccacactcccccactgggtggtcggcacccagcaaccccatggtgatcatggtcacaggaaaccacagaaaaccttccctcctggcccacccaggtcccctggtgaaatcaggagagagagtcatcctgcaatgttggtcagatatcatgtttgagcacttctttctgcacaaagagtggatctctaaggacccctcacgcctcgttggacagatccatgatggggtctccaaggccaatttctccatcggttccatgatgcgtgcccttgcagggacctacagatgctacggttctgttactcacaccccctatcagttgtcagctcccagtgatcccctggacatcgtggtcacaggtctatatgagaaaccttctctctcagcccagccgggccccaaggttcaggcaggagagagcgtgaccttgtcctgtagctcccggagctcctatgacatgtaccatctatccagggaggggggagcccatgaacgtaggctccctgcagtgcgcaaggtcaacagaacattccaggcagatttccctctgggccctgccacccacggagggacctacagatgcttcggctctttccgtcactctccctacgagtggtcagacccgagtgacccactgcttgtttctgtcacaggaaacccttcaagtagttggccttcacccacagaaccaagctccaaatctggtaacctcagacacctgcacattctgattgggacctcagtggtcaaaatccctttcaccatcctcctcttctttctccttcatcgctggtgctccaacaaaaaaaaatgctgctgtaatggaccaagagcctgcagggaacagaag

SEQ ID NO: 8564 - DNA, 1131 bp, Artificial Sequence
  Synthetic Polynucleotide
tctctgactaaccacacagaaaccatcaccgtggaggaaggccagacgctcactctaaagtgtgtcacttctctgaggaagaactcctccctccagtggctgaccccctcagggttcaccatttttttaaatgagtatcctgctttaaaaaattccaaataccagcttcttcatcactcggccaatcagctctccatcactgtgcctaacgtaaccctgcaagatgaaggcgtgtacaagtgcttacattacagcgactctgtaagcacaaaggaagtgaaagtgattgtgctggcaactcctttcaagccaatcctggaagcttcagttatcagaaagcaaaatggagaagaacatgttgtactcatgtgctccaccatgagaagcaagccccctccgcagataacctggctacttgggaatagcatggaagtgtccggtggaacgctccatgaatttgaaactgatgggaagaaatgtaatactaccagcactctcataatccacacttatggcaaaaattcaacggtggactgcattatccgacacagaggcctgcaagggagaaaactagtagcacccttccggtttgaagatttggttactgatgaagagacagcttcagatgctctggagagaaactctctatcctctcaagacccacagcagcccaccagtactgtctcagtaacggaagattctagtacatcggagattgacaaggaagagaaagaacaaaccactcaagatcctgacttgaccaccgaagcaaatcctcagtatttaggactggcaagaaagaaaagtggcatcctgctgctcacgctggtgtccttcctcattttcatactcttcatcatagtccagctcttcatcatgaagctgaggaaagcacatgtgatatggaagaaagaaaacgaagtttcagaacacacactagaaagttacagatcaaggtcaaataatgaagaaacatcatctgaagagaaaaatggccaatcttcccaccctatgcgttgcatgaactacatcacaaagttgtactcagaagcaaaaacaaagaggaaggaaaatgtacaacattcaaaattagaagaaaagcacatccaagtaccagagagtattgtgtag

SEQ ID NO: 8565 - DNA, 669 bp, Artificial Sequence
  Synthetic Polynucleotide
atgatgacaggcacaatagaaacaacggggaacatttctgcagagaaaggtggctctatcatcttacaatgtcacctctcctccaccacggcacaagtgacccaggtcaactgggagcagcaggaccagcttctggccatttgtaatgctgacttggggtggcacatctccccatccttcaaggatcgagtggccccaggtcccggcctgggcctcaccctccagtcgctgaccgtgaacgatacaggggagtacttctgcatctatcacacctaccctgatgggacgtacactgggagaatcttcctggaggtcctagaaagctcagtggctgagcacggtgccaggttccagattccattgcttggagccatggccgcgacgctggtggtcatctgcacagcagtcatcgtggtggtcgcgttgactagaaagaagaaagccctcagaatccattctgtggaaggtgacctcaggagaaaatcagctggacaggaggaatggagccccagtgctccctcacccccaggaagctgtgtccaggcagaagctgcacctgctgggctctgtggagagcagcggggagaggactgtgccgagctgcatgactacttcaatgtcctgagttacagaagcctgggtaactgcagcttcttcacagagactggt

SEQ ID NO: 8566 - DNA, 933 bp, Artificial Sequence
  Synthetic Polynucleotide
caaagcagcttaaccccattgatggtgaacgggattctgggggagtcagtaactcttcccctggagtttcctgcaggagagaaggtcaacttcatcacttggcttttcaatgaaacatctcttgccttcatagtaccccatgaaaccaaaagtccagaaatccacgtgactaatccgaaacagggaaagcgactgaacttcacccagtcctactccctgcaactcagcaacctgaagatggaagacacaggctcttacagagcccagatatccacaaagacctctgcaaagctgtccagttacactctgaggatattaagacaactgaggaacatacaagttaccaatcacagtcagctatttcagaatatgacctgtgagctccatctgacttgctctgtggaggatgcagatgacaatgtctcattcagatgggaggccttgggaaacacactttcaagtcagccaaacctcactgtctcctgggaccccaggatttccagtgaacaggactacacctgcatagcagagaatgctgtcagtaatttatccttctctgtctctgcccagaagctttgcgaagatgttaaaattcaatatacagataccaaaatgattctgtttatggtttctgggatatgcatagtcttcggtttcatcatactgctgttacttgttttgaggaaaagaagagattccctatctttgtctactcagcgaacacagggccccgcagagtccgcaaggaacctagagtatgtttcagtgtctccaacgaacaacactgtgtatgcttcagtcactcattcaaacagggaaacagaaatctggacacctagagaaaatgatactatcacaatttactccacaattaatcattccaaagagagtaaacccactttttccagggcaactgcccttgacaatgtcgtg

SEQ ID NO: 8567 - DNA, 939 bp, Artificial Sequence
  Synthetic Polynucleotide
tctggacccgtgaaagagctggtcggttccgttggtggggccgtgactttccccctgaagtccaaagtaaagcaagttgactctattgtctggaccttcaacacaacccctcttgtcaccatacagccagaagggggcactatcatagtgacccaaaatcgtaatagggagagagtagacttcccagatggaggctactccctgaagctcagcaaactgaagaagaatgactcagggatctactatgtggggatatacagctcatcactccagcagccctccacccaggagtacgtgctgcatgtctacgagcacctgtcaaagcctaaagtcaccatgggtctgcagagcaataagaatggcacctgtgtgaccaatctgacatgctgcatggaacatggggaagaggatgtgatttatacctggaaggccctggggcaagcagccaatgagtcccataatgggtccatcctccccatctcctggagatggggagaaagtgatatgaccttcatctgcgttgccaggaaccctgtcagcagaaacttctcaagccccatccttgccaggaagctctgtgaaggtgctgctgatgacccagattcctccatggtcctcctgtgtctcctgttggtgcccctcctgctcagtctctttgtactggggctatttctttggtttctgaagagagagagacaagaagagtacattgaagagaagaagagagtggacatttgtcgggaaactcctaacatatgcccccattctggagagaacacagagtacgacacaatccctcacactaatagaacaatcctaaaggaagatccagcaaatacggtttactccactgtggaaataccgaaaaagatggaaaatccccactcactgctcacgatgccagacacaccaaggctatttgcctatgagaatgttatc

SEQ ID NO: 8568 - DNA, 726 bp, Artificial Sequence
  Synthetic Polynucleotide
gctactccagcccccaagagctgcccagagaggcactactgggctcagggaaagctgtgctgccagatgtgtgagccaggaacattcctcgtgaaggactgtgaccagcatagaaaggctgctcagtgtgatccttgcataccgggggtctccttctctcctgaccaccacacccggccccactgtgagagctgtcggcactgtaactctggtcttctcgttcgcaactgcaccatcactgccaatgctgagtgtgcctgtcgcaatggctggcagtgcagggacaaggagtgcaccgagtgtgatcctcttccaaacccttcgctgaccgctcggtcgtctcaggccctgagcccacaccctcagcccacccacttaccttatgtcagtgagatgctggaggccaggacagctgggcacatgcagactctggctgacttcaggcagctgcctgcccggactctctctacccactggccaccccaaagatccctgtgcagctccgattttattcgcatccttgtgatcttctctggaatgttccttgttttcaccctggccggggccctgttcctccatcaacgaaggaaatatagatcaaacaaaggagaaagtcctgtggagcctgcagagccttgtcattacagctgccccagggaggaggagggcagcaccatccccatccaggaggattaccgaaaaccggagcctgcctgctccccctga

SEQ ID NO: 8569 - DNA, 1890 bp, Artificial Sequence
  Synthetic Polynucleotide
gggcacctccccaagcccaccctctgggctgaaccaggctctgtgatcacccaggggagtcctgtgaccctcaggtgtcaggggggccaggagacccaggagtaccgtctatatagagaaaagaaaacagcaccctggattacacggatcccacaggagcttgtgaagaagggccagttccccatcccatccatcacctgggaacacacagggcggtatcgctgttactatggtagcgacactgcaggccgctcagagagcagtgaccccctggagctggtggtgacaggagcctacatcaaacccaccctctcagcccagcccagccccgtggtgaactcaggagggaatgtaaccctccagtgtgactcacaggtggcatttgatggcttcattctgtgtaaggaaggagaagatgaacacccacaatgcctgaactcccagccccatgcccgtgggtcgtcccgcgccatcttctccgtgggccccgtgagcccgagtcgcaggtggtggtacaggtgctatgcttatgactcgaactctccctatgagtggtctctacccagtgatctcctggagctcctggtcctaggtgtttctaagaagccatcactctcagtgcagccaggtcctatcgtggcccctgaggagaccctgactctgcagtgtggctctgatgctggctacaacagatttgttctgtataaggacggggaacgtgacttccttcagctcgctggcgcacagccccaggctgggctctcccaggccaacttcaccctgggccctgtgagccgctcctacgggggccagtacagatgctacggtgcacacaacctctcctccgagtggtcggcccccagcgaccccctggacatcctgatcgcaggacagttctatgacagagtctccctctcggtgcagccgggccccacggtggcctcaggagagaacgtgaccctgctgtgtcagtcacagggatggatgcaaactttccttctgaccaaggagggggcagctgatgacccatggcgtctaagatcaacgtaccaatctcaaaaataccaggctgaattccccatgggtcctgtgacctcagcccatgcggggacctacaggtgctacggctcacagagctccaaaccctacctgctgactcaccccagtgaccccctggagctcgtggtctcaggaccgtctgggggccccagctccccgacaacaggccccacctccacatctgcaggccctgaggaccagcccctcacccccaccgggtcggatccccagagtggtctgggaaggcacctgggggttgtgatcggcatcttggtggccgtcatcctactgctcctcctcctcctcctcctcttcctcatcctccgacatcgacgtcagggcaaacactggacatcgacccagagaaaggctgatttccaacatcctgcaggggctgtggggccagagcccacagacagaggcctgcagtggaggtccagcccagctgccgatgcccaggaagaaaacctctatgctgccgtgaagcacacacagcctgaggatggggtggagatggacactcggcagagcccacacgatgaagacccccaggcagtgacgtatgccgaggtgaaacactccagacctaggagagaaatggcctctcctccttccccactgtctggggaattcctggacacaaaggacagacaggcggaagaggacaggcagatggacactgaggctgctgcatctgaagccccccaggatgtgacctacgcccagctgcacagcttgaccctcagacgggaggcaactgagcctcctccatcccaggaagggccctctccagctgtgcccagcatctacgccactctggccatccactag

SEQ ID NO: 8570 - DNA, 801 bp, Artificial Sequence
  Synthetic Polynucleotide
caggaggaagatctgcccagaccctccatctcggctgagccaggcaccgtgatccccctggggagccatgtgactttcgtgtgccggggcccggttggggttcaaacattccgcctggagagggacagtagatccacatacaatgatactgaagatgtgtctcaagctagtccatctgagtcagaggccagattccgcattgactcagtaagagaaggaaatgccgggctttatcgctgcatctattataagccccctaaatggtctgagcagagtgactacctggagctgctggtgaaagaaagctctggaggcccggactccccggacacagagcccggctcctcagctggacccacgcagaggccgtcggacaacagtcacaatgagcatgcacctgcttcccaaggcctgaaagctgagcatctgtatattctcatcggggtctcagtggtcttcctcttctgtctcctcctcctggtcctcttctgcctccatcgccagaatcagataaagcaggggccccccagaagcaaggacgaggagcagaagccacagcagaggcctgacctggctgttgatgttctagagaggacagcagacaaggccacagtcaatggacttcctgagaaggacagagagacggacacctcggccctggctgcagggagttcccaggaggtgacgtatgctcagctggaccactgggccctcacacagaggacagcccgggctgtgtccccacagtccacaaagcccatggccgagtccatcacgtatgcagccgttgccagacactga

SEQ ID NO: 8571 - DNA, 696 bp, Artificial Sequence; identical to SEQ ID NO: 1574
  Synthetic Polynucleotide

SEQ ID NO: 8572 - DNA, 606 bp, Artificial Sequence; identical to SEQ ID NO: 1576
  Synthetic Polynucleotide

SEQ ID NO: 8573 - DNA, 747 bp, Artificial Sequence; identical to SEQ ID NO: 1578
  Synthetic Polynucleotide

SEQ ID NO: 8574 - DNA, 1038 bp, Artificial Sequence; identical to SEQ ID NO: 1580
  Synthetic Polynucleotide

SEQ ID NO: 8575 - DNA, 804 bp, Artificial Sequence; identical to SEQ ID NO: 1582
  Synthetic Polynucleotide

SEQ ID NO: 8576 - DNA, 1080 bp, Artificial Sequence; identical to SEQ ID NO: 1584
  Synthetic Polynucleotide

SEQ ID NO: 8577 - DNA, 195 bp, Artificial Sequence; identical to SEQ ID NO: 1471
  Synthetic Polynucleotide

SEQ ID NO: 8578 - DNA, 714 bp, Artificial Sequence; identical to SEQ ID NO: 1417
  Synthetic Polynucleotide

SEQ ID NO: 8579 - DNA, 132 bp, Artificial Sequence
  Synthetic Polynucleotide
attacccaaggactggctgtgtctacaatctctagcttctctccgcctggataccaagtctccttctgtcttgtgatggtcctcctgtttgctgtggacacaggactgtacttttccgtgaaaacgaacatc

SEQ ID NO: 8580 - DNA, 225 bp, Artificial Sequence; identical to SEQ ID NO: 1376
  Synthetic Polynucleotide

SEQ ID NO: 8581 - DNA, 468 bp, Artificial Sequence; identical to SEQ ID NO: 1390
  Synthetic Polynucleotide

SEQ ID NO: 8582 - DNA, 279 bp, Artificial Sequence; identical to SEQ ID NO: 1408
  Synthetic Polynucleotide

SEQ ID NO: 8583 - DNA, 381 bp, Artificial Sequence
  Synthetic Polynucleotide
ggaaacccttcaaatagttggccttcacccactgaaccaagctccaaaaccggtaacccccgacacctgcacattctgattgggacctcagtggtcatcatcctcttcatcctcctcttctttctccttcatcgctggtgctccaacaaaaaaaatgctgcggtaatggaccaagagtctgcaggaaacagaacagcgaatagcgaggactctgatgaacaagaccctcaggaggtgacatacacacagttgaatcactgcgttttcacacagagaaaaatcactcgcccttctcagaggcccaagacacccccaacagatatcatcgtgtacacggaacttccaaatgctgagtccagatccaaagttgtctcctgccca

SEQ ID NO: 8584 - DNA, 429 bp, Artificial Sequence
  Synthetic Polynucleotide
ccatacgagtggtcaaactcgagtgacccactgcttgtttctgtcacaggaaacccttcaaatagttggccttcacccactgaaccaagctctaaaaccggtaacccccgacacctgcacattctgattgggacctcagtggtcatcatcctcttcatcctcctcttctttctccttcatcgctggtgctccaacaaaaaaaatgctgcggtaatggaccaagagtctgcagggaacagaacagcgaatagcgaggactctgatgaacaagaccctcaggaggtgacatacacacagttgaatcactgcgttttcacacagagaaaaatcactcgcccttctcagaggcccaagacacccccaacagatatcatcgtgtacacggaacttccaaatgctgagtccagatccaaagttgtctcctgccca

SEQ ID NO: 8585 - DNA, 360 bp, Artificial Sequence
  Synthetic Polynucleotide
ggaaacccttcaaatagttggccttcacccactgaaccaagctccgaaaccggtaaccccagacacctgcatgttctgattgggacctcagtggtcatcatcctcttcatcctcctcctcttctttctccttcatcgctggtgctgcaacaaaaaaaatgctgttgtaatggaccaagagcctgcagggaacagaacagtgaacagggaggactctgatgaacaagaccctcaggaggtgacatatgcacagttgaatcactgcgttttcacacagagaaaaatcactcgcccttctcagaggcccaagacacccccaacagatatcatcgtgtacacggaacttccaaatgctgagccc

SEQ ID NO: 8586 - DNA, 525 bp, Artificial Sequence
  Synthetic Polynucleotide
ccctatgagtggtcagacccgagtgacccactgcttgtttctgtcacaggaaactcttcaagtagttcatcttcacccactgaaccaagctccaaaactggtatccgcagacacctgcacattctgattgggacctcagtggctatcatcctcttcatcatcctcttcttctttctccttcattgctgctgctccaacaaaaagaatgctgctgtaatggaccaagagcctgccggggacagaacagtgaacagggaggactctgatgatcaagaccctcaggaggtgacatatgcacagttggatcactgcgttttcacacagacaaaaatcacttccccttctcagaggcccaagacacctccaacagataccaccatgtacatggaacttccaaatgctaagccaagatcattgtctcctgcccataagcaccacagtcaggccttgaggggatcttctagggagacaacagccctgtctcaaaaccgggttgctagctcccatgtaccagcagctggaatc

SEQ ID NO: 8587 - DNA, 525 bp, Artificial Sequence
  Synthetic Polynucleotide
ccctatgagtggtcagacccgagtgacccactgcttgtttctgtcacaggaaactcttcaagtagttcatcttcacccactgaaccaagctccaaaactggtatccgcagacacctgcacattctgattgggacctcagtggctatcatcctcttcatcatcctcttcttctttctccttcattgctgctgctccaacaaaaagaatgctgctgtaatggaccaagggcctgccggggacagaacagtgaacagggaggactctgatgatcaagaccctcaggaggtgacatatgcacagttggatcactgcgttttcacacagacaaaaatcacttccccttctcagaggcccaaggcacctccaacagataccaccatgtacatggaacttccaaatgctaagccaagatcattgtctcctgcccataagcaccacagtcaggccttgaggggatcttctagggagacaacagccctgtctcaaaaccgggttgctagctcccatgtaccagcagctggaatc

SEQ ID NO: 8588 - DNA, 384 bp, Artificial Sequence
  Synthetic Polynucleotide
ggaaacccttcaagtagttggccttcacccacagaaccaagctccaaatctggtaaccccagacacctgcacattctgattgggacctcagtggtcatcatcctcttcatcctcctcctcttctttctccttcatctctggtgctccaacaaaaaaaatgctgctgtaatggaccaagagcctgcagggaacagaacagccaacagcgaggactctgatgaacaagaccctgaggaggtgacatacgcacagttggatcactgcgttttcacacagagaaaaatcactcgcccttctcagaggcccaagacaccccctacagataccatcttgtacacggaacttccaaatgctaagcccagatccaaagttgtctcctgccca

SEQ ID NO: 8589 - DNA, 414 bp, Artificial Sequence
  Synthetic Polynucleotide
ccctgcgtgtggtcaaactcaagtgacccactgcttgtttctgtcacaggtatctgcagacacctgcatgttctgattgggacctcagtggtcatcttcctcttcatcctcctcctcttctttctcctttatcgctggtgctccaacaaaaagaatgctgctgtaatggaccaagagcctgcgggggacagaacagtgaataggcaggactctgatgaacaagaccctcaggaggtgacgtacgcacagttggatcactgcgttttcatacagagaaaaatcagtcgcccttctcagaggcccaagacacccctaacagataccagcgtgtacacggaacttccaaatgctgagcccagatccaaagttgtctcctgcccacgagcaccacagtcaggtcttgagggggttttc

SEQ ID NO: 8590 - DNA, 465 bp, Artificial Sequence
  Synthetic Polynucleotide
ccctgcgtgtggtcaaactcaagtgacccactgcttgtttctgtcacaggaaacccttcaagtagttggccttcacccacagaaccaagctccaaatctggtatctgcagacacctgcatgttctgattgggacctcagtggtcatcttcctcttcatcctcctcctcttctttctcctttatcgctggtgctccaacaaaaagaatgctgctgtaatggaccaagagcctgcgggggacagaacagtgaataggcaggactctgatgaacaagaccctcaggaggtgacgtacgcacagttggatcactgcgttttcatacagagaaaaatcagtcgcccttctcagaggcccaagacacccctaacagataccagcgtgtacacggaacttccaaatgctgagcccagatccaaagttgtctcctgcccacgagcaccacagtcaggtcttgagggggttttc

SEQ ID NO: 8591 - DNA, 345 bp, Artificial Sequence
  Synthetic Polynucleotide
tctttccgtgccctgccccatgcgtggtcagacccgagtgacccactgcccgtttctgtcacaggtaactccagaaacctgcacgttctgattgggacctcagtggtcatcatcccctttgctatcctcctcttctttctccttcatcgctggtgtgccaacaaaaagaatgctgttgtaatggaccaagagcctgcagggaacagaacagtgaacagggaggactctgatgaacaagaccctcaggaggtgacatacgcacagttgaatcactgcgttttcacacagagaaaaatcactcgcccttctcagaggcccaagacacccccaacagataccagcgtg

SEQ ID NO: 8592 - DNA, 525 bp, Artificial Sequence
  Synthetic Polynucleotide
ccctacgagtggtcagacccgagtgacccactgcctgtttctgtcacaggaaacccttctagtagttggccttcacccactgaaccaagcttcaaaactggtatcgccagacacctgcatgctgtgattaggtactcagtggccatcatcctctttaccatccttcccttctttctccttcatcgctggtgctccaaaaaaaaaaatgctgctgtaatgaaccaagagcctgcgggacacagaacagtgaacagggaggactctgatgaacaagaccctcaggaggtgacatacgcacagttggatcactgcattttcacacagagaaaaatcactggcccttctcagaggagcaagagaccctcaacagataccagcgtgtgtatagaacttccaaatgctgagcccagagcgttgtctcctgcccatgagcaccacagtcaggccttgatgggatcttctagggagacaacagccctgtctcaaacccagcttgccagctctaatgtaccagcagctggaatc

SEQ ID NO: 8593 - DNA, 213 bp, Artificial Sequence
  Synthetic Polynucleotide
ccctacgagtggtcagacccgagtgacccactgcctgtttctgtcacaggaaacccttctagtagttggccttcacccactgaaccaagcttcaaaactggtatcgccagacacctgcatgctgtgattaggtactcagtggccatcatcctctttaccatccttcccttctttctccttcatcgctggtgctccaaaaaaaaaatgctgctg

SEQ ID NO: 8594 - DNA, 249 bp, Artificial Sequence
  Synthetic Polynucleotide
ggaaacccttcaaatagttggccttcacccactgaaccaagctccgaaaccggtaaccccagacacctacatgttctgattgggacctcagtggtcaaaatccctttcaccatcctcctcttctttctccttcatcgctggtgctccgacaaaaaaaatgctgctgtaatggaccaagagcctgcagggaacagaacagtgaacagcgaggattctgatgaacaagaccatcaggaggtgtcatacgca

SEQ ID NO: 8595 - DNA, 297 bp, Artificial Sequence
  Synthetic Polynucleotide
ccctatgagtggtcaaactcgagtgacccactgcttgtttctgtcacaggaaacccttcaaatagttggccttcacccactgaaccaagctccaaaaccggtaaccccagacacctgcatgttctgattgggacctcagtggtcaaaatccctttcaccatcctcctcttctttctccttcatcgctggtgctccaacaaaaaaaatgctgctgtaatggaccaagagcctgcagggaacagaacagtgaacagcgaggattctgatgaacaagaccatcaggaggtgtcatacgca

SEQ ID NO: 8596 - DNA, 297 bp, Artificial Sequence
  Synthetic Polynucleotide
ccctacgagtggtcaaagtcaagtgacccactgcttgtttctgtcacaggaaacccttcaaatagttggccttcacccactgaaccaagctccaaaaccggtaaccccagacacctacacgttctgattgggacctcagtggtcaaactccctttcaccatcctcctcttctttctccttcatcgctggtgctccgacaaaaaaaatgcatctgtaatggaccaagggcctgcggggaacagaacagtgaacagggaggattctgacgaacaggaccatcaggaggtgtcatacgca

SEQ ID NO: 8597 - DNA, 249 bp, Artificial Sequence
  Synthetic Polynucleotide
ggcaatcccagcaatagctggccctctccaacagagcccagcagcaagacaggcaaccccagacatctgcacgtgctgatcggaaccagcgtggtcaagatcccctttacaatcctgctgttctttctgctccatcggtggtgcagcgacaagaaaaacgccgccgtgatggaccaagagcctgccggcaatagaaccgtgaacagcgaggatagcgacgagcaggaccaccaagaggtgtcctatgct

SEQ ID NO: 8598 - DNA, 300 bp, Artificial Sequence
  Synthetic Polynucleotide
ccatacgagtggtcaaagtcaagtgacccactgcttgtttctgtcacaggaaactcttcaaatagttggccttcacccactgaaccaagctccgaaaccggtaaccccagacacctacacgttctgattgggacctcagtggtcaaactccctttcaccatcctcctcttctttctccttcatcgctggtgctccaacaaaaaaaatgcatctgtaatggaccaagggcctgcggggaacagaacagtgaacagggaggattctgatgaacaggaccatcaggaggtgtcatacgcataa

SEQ ID NO: 8599 - DNA, 198 bp, Artificial Sequence
  Synthetic Polynucleotide
ggaaacccttcaagtagttggccttcacccacagaaccaagctccaaatctggtaacctcagacacctgcacattctgattgggacctcagtggtcaaaatccctttcaccatcctcctcttctttctccttcatcgctggtgctccaacaaaaaaaaatgctgctgtaatggaccaagagcctgcagggaacagaag

SEQ ID NO: 8600 - DNA, 552 bp, Artificial Sequence
  Synthetic Polynucleotide
cccttccggtttgaagatttggttactgatgaagagacagcttcagatgctctggagagaaactctctatcctctcaagacccacagcagcccaccagtactgtctcagtaacggaagattctagtacatcggagattgacaaggaagagaaagaacaaaccactcaagatcctgacttgaccaccgaagcaaatcctcagtatttaggactggcaagaaagaaaagtggcatcctgctgctcacgctggtgtccttcctcattttcatactcttcatcatagtccagctcttcatcatgaagctgaggaaagcacatgtgatatggaagaaagaaaacgaagtttcagaacacacactagaaagttacagatcaaggtcaaataatgaagaaacatcatctgaagagaaaaatggccaatcttcccaccctatgcgttgcatgaactacatcacaaagttgtactcagaagcaaaaacaaagaggaaggaaaatgtacaacattcaaaattagaagaaaagcacatccaagtaccagagagtattgtgtag

SEQ ID NO: 8601 - DNA, 363 bp, Artificial Sequence
  Synthetic Polynucleotide
ctggaggtcctagaaagctcagtggctgagcacggtgccaggttccagattccattgcttggagccatggccgcgacgctggtggtcatctgcacagcagtcatcgtggtggtcgcgttgactagaaagaagaaagccctcagaatccattctgtggaaggtgacctcaggagaaaatcagctggacaggaggaatggagccccagtgctccctcacccccaggaagctgtgtccaggcagaagctgcacctgctgggctctgtggagagcagcggggagaggactgtgccgagctgcatgactacttcaatgtcctgagttacagaagcctgggtaactgcagcttcttcacagagactggt

SEQ ID NO: 8602 - DNA, 369 bp, Artificial Sequence
  Synthetic Polynucleotide
gcccagaagctttgcgaagatgttaaaattcaatatacagataccaaaatgattctgtttatggtttctgggatatgcatagtcttcggtttcatcatactgctgttacttgttttgaggaaaagaagagattccctatctttgtctactcagcgaacacagggccccgcagagtccgcaaggaacctagagtatgtttcagtgtctccaacgaacaacactgtgtatgcttcagtcactcattcaaacagggaaacagaaatctggacacctagagaaaatgatactatcacaatttactccacaattaatcattccaaagagagtaaacccactttttccagggcaactgcccttgacaatgtcgtg

SEQ ID NO: 8603 - DNA, 387 bp, Artificial Sequence
  Synthetic Polynucleotide
agccccatccttgccaggaagctctgtgaaggtgctgctgatgacccagattcctccatggtcctcctgtgtctcctgttggtgcccctcctgctcagtctctttgtactggggctatttctttggtttctgaagagagagagacaagaagagtacattgaagagaagaagagagtggacatttgtcgggaaactcctaacatatgcccccattctggagagaacacagagtacgacacaatccctcacactaatagaacaatcctaaaggaagatccagcaaatacggtttactccactgtggaaataccgaaaaagatggaaaatccccactcactgctcacgatgccagacacaccaaggctatttgcctatgagaatgttatc

SEQ ID NO: 8604 - DNA, 246 bp, Artificial Sequence
  Synthetic Polynucleotide
ccaccccaaagatccctgtgcagctccgattttattcgcatccttgtgatcttctctggaatgttccttgttttcaccctggccggggccctgttcctccatcaacgaaggaaatatagatcaaacaaaggagaaagtcctgtggagcctgcagagccttgtcattacagctgccccagggaggaggagggcagcaccatccccatccaggaggattaccgaaaaccggagcctgcctgctccccc

SEQ ID NO: 8605 - DNA, 513 bp, Artificial Sequence
  Synthetic Polynucleotide
ctgctggtgaaagaaagctctggaggcccggactccccggacacagagcccggctcctcagctggacccacgcagaggccgtcggacaacagtcacaatgagcatgcacctgcttcccaaggcctgaaagctgagcatctgtatattctcatcggggtctcagtggtcttcctcttctgtctcctcctcctggtcctcttctgcctccatcgccagaatcagataaagcaggggccccccagaagcaaggacgaggagcagaagccacagcagaggcctgacctggctgttgatgttctagagaggacagcagacaaggccacagtcaatggacttcctgagaaggacagagagacggacacctcggccctggctgcagggagttcccaggaggtgacgtatgctcagctggaccactgggccctcacacagaggacagcccgggctgtgtccccacagtccacaaagcccatggccgagtccatcacgtatgcagccgttgccagacactga

SEQ ID NO: 8606 - DNA, 732 bp, Artificial Sequence
  Synthetic Polynucleotide
caccccagtgaccccctggagctcgtggtctcaggaccgtctgggggccccagctccccgacaacaggccccacctccacatctgcaggccctgaggaccagcccctcacccccaccgggtcggatccccagagtggtctgggaaggcacctgggggttgtgatcggcatcttggtggccgtcatcctactgctcctcctcctcctcctcctcttcctcatcctccgacatcgacgtcagggcaaacactggacatcgacccagagaaaggctgatttccaacatcctgcaggggctgtggggccagagcccacagacagaggcctgcagtggaggtccagcccagctgccgatgcccaggaagaaaacctctatgctgccgtgaagcacacacagcctgaggatggggtggagatggacactcggcagagcccacacgatgaagacccccaggcagtgacgtatgccgaggtgaaacactccagacctaggagagaaatggcctctcctccttccccactgtctggggaattcctggacacaaaggacagacaggcggaagaggacaggcagatggacactgaggctgctgcatctgaagccccccaggatgtgacctacgcccagctgcacagcttgaccctcagacgggaggcaactgagcctcctccatcccaggaagggccctctccagctgtgcccagcatctacgccactctggccatccactag

SEQ ID NO: 8607 - DNA, 291 bp, Artificial Sequence
  Synthetic Polynucleotide
ggcccaagtcctgctgatcttagcccaggcgcttcctctgtgactcctccagctcctgcacgcgaacctggacactctccccagatcatctcattttttctcgctctcacatcaaccgctttgctgttcctgctcttttttctcaccctccggttctccgtggttaagagaggccggaaaaaactcctctatatctttaaacagccctttatgcgcccggtccaaacaacccaagaggaagatggctgctcttgcagattcccggaagaggaagaaggcggctgcgagctg

SEQ ID NO: 8608 - DNA, 324 bp, Artificial Sequence
  Synthetic Polynucleotide
aaaattgaagtcatgtatcctccgccgtacctcgataacgagaaaagcaatgggacgatcattcacgtcaagggaaaacatctctgccccagtcctctgttccctgggccttccaaaccattttgggttctcgtcgtcgtcggcggagtcctggcttgttattctctgcttgtgacagtcgcctttatcatattctgggtccgctccaagagaagcagactgctccactccgattatatgaatatgacacccaggcggccagggcctacacggaaacactatcaaccctacgctccacctcgggatttcgctgcctacagatca

SEQ ID NO: 8609 - DNA, 333 bp, Artificial Sequence
  Synthetic Polynucleotide
gaagatcgggacccaccagccactcagcctcaagaaactcaggggcctcctgctaggcccattacagtgcaacctaccgaggcttggccccggacatctcagggaccttctacaaggccagtggaagtgccaggcggtagagctgtggctgctatccttggattgggcctcgttctcggactgttgggaccacttgcaatcctgctggctctctatctgctgcggcgggatcagagactccctccagatgctcataagccacctggcggcggatctttcaggaccccaattcaagaagaacaagccgacgctcactctaccctggctaagatc

SEQ ID NO: 8610 - DNA, 465 bp, Artificial Sequence
  Synthetic Polynucleotide
caggattgtcaaaatgcacatcaagagttccggttttggccgtttcttgtgattatcgtgattctgtctgccctcttcctcggaactctggcttgcttctgtgtctggcggcgcaaacggaaagagaaacagtctgagacttccccgaaagagtttctcacgatatacgaagatgtcaaggacctcaagacccgccgcaaccatgagcaagaacagacattcccaggcggaggctccacaatctactccatgattcagtcccagtctagcgccccaacctctcaagagcctgcttataccctgtacagtctgattcagccctccagaaagtccggctctcggaagaggaaccactctcctagcttcaactccaccatatatgaagtcattggcaagtctcagcccaaagcacagaatcctgccaggctgagcagaaaagaacttgagaatttcgacgtctactcc

SEQ ID NO: 8611 - DNA, 291 bp, Artificial Sequence
  Synthetic Polynucleotide
gttcaggctcccagcagctccccaatgggcattattgtggccgtcgtgaccggaattgctgtggccgcaatcgtggcagctgtcgtcgctctgatctattgcagaaagaagcggatcagcgccctgccagggtatcctgagtgccgcgaaatgggcgaaactctgcctgagaaacctgctaaccccacaaatcccgatgaagctgacaaagtcggcgctgaaaacacgatcacatactccctgctcatgcatcctgacgctcttgaggaacctgacgatcagaaccggatc

SEQ ID NO: 8612 - DNA, 291 bp, Artificial Sequence
  Synthetic Polynucleotide
ctgcaagtcctgggccttcagctgccaactccagtgtggtttcatgtcctgttctatctggctgtggggattatgttccttgtgaataccgtgctctgggttaccattcggaaagaactcaagcgcaagaaaaaatgggatcttgagataagcctggacagcgggcatgagaagaaagtcatcagttcccttcaagaggacagacatctcgaagaggaactcaaatgtcaagaacaaaaagaagaacaactccaagagggtgtccatcggaaagagccacagggcgctaca

SEQ ID NO: 8613 - DNA, 144 bp, Artificial Sequence
  Synthetic Polynucleotide
taccaagtgtccttctgcctggtcatggtgctgctgttcgccgtggataccggcctgtacttcagcgtcaagaccaacatccggtccagcaccagagactggaaggaccacaagttcaagtggcggaaggaccctcaggacaag

SEQ ID NO: 8614 - DNA, 144 bp, Artificial Sequence
  Synthetic Polynucleotide
taccaagtctccttctgtcttgtgatggtcctcctgtttgctgtggacacaggactgtacttttccgtgaaaacgaacatccgcagctccacacgcgattggaaagatcacaagtttaaatggcgcaaagatccccaggacaag

SEQ ID NO: 8615 - DNA, 81 bp, Artificial Sequence
  Synthetic Polynucleotide
taccaagtctccttctgtcttgtgatggtcctcctgtttgctgtggacacaggactgtacttttccgtgaaaacgaacatc

SEQ ID NO: 8616 - DNA, 198 bp, Artificial Sequence
  Synthetic Polynucleotide
gctggcaccgtcctgttgcttagagccggattctatgccgtcagcttcctgtccgtggctgtggggtctacagtgtattaccagggaaaatgtctcacctggaaaggccccagacgccagcttccagctgttgttcctgctccactgccaccaccttgtggctcctctgctcacttgcttccaccagtgcctggcgga

SEQ ID NO: 8617 - DNA, 252 bp, Artificial Sequence
  Synthetic Polynucleotide
ctggtcccagtgttctgcggactgctggttgccaagtctctggtgctgagcgcactcctcgtttggtggggcgatatttggtggaaaacgatgatggaattgagatccctcgatacgcagaaagccacatgccaccttcagcaagtcacagacttgccttggaccagcgtcagctctcccgtggaacgggaaattctgtatcatacagtggcccgcaccaagatttccgacgatgacgacgagcacacactg

SEQ ID NO: 8618 - DNA, 138 bp, Artificial Sequence
  Synthetic Polynucleotide
atggggcttgcattcctggtcctggtggctcttgtctggtttctggtcgaggactggctgtcccggaagagaaccagagaaagagcttccagggccagcacctgggaaggcagacgcagactgaatactcagaccctg

SEQ ID NO: 8619 - DNA, 315 bp, Artificial Sequence
  Synthetic Polynucleotide
ctgcacattctgattgggacctcagtggtcatcatcctcttcatcctcctcttctttctccttcatcgctggtgctccaacaaaaaaaatgctgcggtaatggaccaagagtctgcaggaaacagaacagcgaatagcgaggactctgatgaacaagaccctcaggaggtgacatacacacagttgaatcactgcgttttcacacagagaaaaatcactcgcccttctcagaggcccaagacacccccaacagatatcatcgtgtacacggaacttccaaatgctgagtccagatccaaagttgtctcctgccca

SEQ ID NO: 8620 - DNA, 318 bp, Artificial Sequence
  Synthetic Polynucleotide
ctgcacattctgattgggacctcagtggtcatcatcctcttcatcctcctcttctttctccttcatcgctggtgctccaacaaaaaaaatgctgcggtaatggaccaagagtctgcagggaacagaacagcgaatagcgaggactctgatgaacaagaccctcaggaggtgacatacacacagttgaatcactgcgttttcacacagagaaaaatcactcgcccttctcagaggcccaagacacccccaacagatatcatcgtgtacacggaacttccaaatgctgagtccagatccaaagttgtctcctgcccatga

SEQ ID NO: 8621 - DNA, 291 bp, Artificial Sequence
  Synthetic Polynucleotide
gttctgattgggacctcagtggtcatcatcctcttcatcctcctcctcttctttctccttcatcgctggtgctgcaacaaaaaaaatgctgttgtaatggaccaagagcctgcagggaacagaacagtgaacagggaggactctgatgaacaagaccctcaggaggtgacatatgcacagttgaatcactgcgttttcacacagagaaaaatcactcgcccttctcagaggcccaagacacccccaacagatatcatcgtgtacacggaacttccaaatgctgagccctga

SEQ ID NO: 8622 - DNA, 414 bp, Artificial Sequence
  Synthetic Polynucleotide
ctgcacattctgattgggacctcagtggctatcatcctcttcatcatcctcttcttctttctccttcattgctgctgctccaacaaaaagaatgctgctgtaatggaccaagagcctgccggggacagaacagtgaacagggaggactctgatgatcaagaccctcaggaggtgacatatgcacagttggatcactgcgttttcacacagacaaaaatcacttccccttctcagaggcccaagacacctccaacagataccaccatgtacatggaacttccaaatgctaagccaagatcattgtctcctgcccataagcaccacagtcaggccttgaggggatcttctagggagacaacagccctgtctcaaaaccgggttgctagctcccatgtaccagcagctggaatctga

SEQ ID NO: 8623 - DNA, 414 bp, Artificial Sequence
  Synthetic Polynucleotide
ctgcacattctgattgggacctcagtggctatcatcctcttcatcatcctcttcttctttctccttcattgctgctgctccaacaaaaagaatgctgctgtaatggaccaagggcctgccggggacagaacagtgaacagggaggactctgatgatcaagaccctcaggaggtgacatatgcacagttggatcactgcgttttcacacagacaaaaatcacttccccttctcagaggcccaaggcacctccaacagataccaccatgtacatggaacttccaaatgctaagccaagatcattgtctcctgcccataagcaccacagtcaggccttgaggggatcttctagggagacaacagccctgtctcaaaaccgggttgctagctcccatgtaccagcagctggaatctga

SEQ ID NO: 8624 - DNA, 321 bp, Artificial Sequence
  Synthetic Polynucleotide
ctgcacattctgattgggacctcagtggtcatcatcctcttcatcctcctcctcttctttctccttcatctctggtgctccaacaaaaaaaatgctgctgtaatggaccaagagcctgcagggaacagaacagccaacagcgaggactctgatgaacaagaccctgaggaggtgacatacgcacagttggatcactgcgttttcacacagagaaaaatcactcgcccttctcagaggcccaagacaccccctacagataccatcttgtacacggaacttccaaatgctaagcccagatccaaagttgtctcctgcccatga

SEQ ID NO: 8625 - DNA, 348 bp, Artificial Sequence
  Synthetic Polynucleotide
gttctgattgggacctcagtggtcatcttcctcttcatcctcctcctcttctttctcctttatcgctggtgctccaacaaaaagaatgctgctgtaatggaccaagagcctgcgggggacagaacagtgaataggcaggactctgatgaacaagaccctcaggaggtgacgtacgcacagttggatcactgcgttttcatacagagaaaaatcagtcgcccttctcagaggcccaagacacccctaacagataccagcgtgtacacggaacttccaaatgctgagcccagatccaaagttgtctcctgcccacgagcaccacagtcaggtcttgagggggttttctag

SEQ ID NO: 8626 - DNA, 348 bp, Artificial Sequence; identical to SEQ ID NO: 8625
  Synthetic Polynucleotide

SEQ ID NO: 8627 - DNA, 264 bp, Artificial Sequence
  Synthetic Polynucleotide
cacgttctgattgggacctcagtggtcatcatcccctttgctatcctcctcttctttctccttcatcgctggtgtgccaacaaaaagaatgctgttgtaatggaccaagagcctgcagggaacagaacagtgaacagggaggactctgatgaacaagaccctcaggaggtgacatacgcacagttgaatcactgcgttttcacacagagaaaaatcactcgcccttctcagaggcccaagacacccccaacagataccagcgtg

SEQ ID NO: 8628 - DNA, 408 bp, Artificial Sequence
  Synthetic Polynucleotide
gctgtgattaggtactcagtggccatcatcctctttaccatccttcccttctttctccttcatcgctggtgctccaaaaaaaaaaatgctgctgtaatgaaccaagagcctgcgggacacagaacagtgaacagggaggactctgatgaacaagaccctcaggaggtgacatacgcacagttggatcactgcattttcacacagagaaaaatcactggcccttctcagaggagcaagagaccctcaacagataccagcgtgtgtatagaacttccaaatgctgagcccagagcgttgtctcctgcccatgagcaccacagtcaggccttgatgggatcttctagggagacaacagccctgtctcaaacccagcttgccagctctaatgtaccagcagctggaatctga

SEQ ID NO: 8629 - DNA, 96 bp, Artificial Sequence
  Synthetic Polynucleotide
gctgtgattaggtactcagtggccatcatcctctttaccatccttcccttctttctccttcatcgctggtgctccaaaaaaaaaatgctgctgtaa

SEQ ID NO: 8630 - DNA, 177 bp, Artificial Sequence
  Synthetic Polynucleotide
gttctgattgggacctcagtggtcaaaatccctttcaccatcctcctcttctttctccttcatcgctggtgctccgacaaaaaaaatgctgctgtaatggaccaagagcctgcagggaacagaacagtgaacagcgaggattctgatgaacaagaccatcaggaggtgtcatacgca

SEQ ID NO: 8631 - DNA, 177 bp, Artificial Sequence
  Synthetic Polynucleotide
gttctgattgggacctcagtggtcaaaatccctttcaccatcctcctcttctttctccttcatcgctggtgctccaacaaaaaaaatgctgctgtaatggaccaagagcctgcagggaacagaacagtgaacagcgaggattctgatgaacaagaccatcaggaggtgtcatacgca

SEQ ID NO: 8632 - DNA, 177 bp, Artificial Sequence
  Synthetic Polynucleotide
gttctgattgggacctcagtggtcaaactccctttcaccatcctcctcttctttctccttcatcgctggtgctccgacaaaaaaaatgcatctgtaatggaccaagggcctgcggggaacagaacagtgaacagggaggattctgacgaacaggaccatcaggaggtgtcatacgca

SEQ ID NO: 8633 - DNA, 189 bp, Artificial Sequence
  Synthetic Polynucleotide
ctgcacgtgctgatcggaaccagcgtggtcaagatcccctttacaatcctgctgttctttctgctccatcggcatcggtggtgcagcgacaagaaaaacgccgccgtgatggaccaagagcctgccggcaatagaaccgtgaacagcgaggatagcgacgagcaggaccaccaagaggtgtcctatgct

SEQ ID NO: 8634 - DNA, 180 bp, Artificial Sequence
  Synthetic Polynucleotide
gttctgattgggacctcagtggtcaaactccctttcaccatcctcctcttctttctccttcatcgctggtgctccaacaaaaaaaatgcatctgtaatggaccaagggcctgcggggaacagaacagtgaacagggaggattctgatgaacaggaccatcaggaggtgtcatacgcataa

SEQ ID NO: 8635 - DNA, 132 bp, Artificial Sequence
  Synthetic Polynucleotide
ctgcacattctgattgggacctcagtggtcaaaatccctttcaccatcctcctcttctttctccttcatcgctggtgctccaacaaaaaaaaatgctgctgtaatggaccaagagcctgcagggaacagaag

SEQ ID NO: 8636 - DNA, 321 bp, Artificial Sequence
  Synthetic Polynucleotide
atcctgctgctcacgctggtgtccttcctcattttcatactcttcatcatagtccagctcttcatcatgaagctgaggaaagcacatgtgatatggaagaaagaaaacgaagtttcagaacacacactagaaagttacagatcaaggtcaaataatgaagaaacatcatctgaagagaaaaatggccaatcttcccaccctatgcgttgcatgaactacatcacaaagttgtactcagaagcaaaaacaaagaggaaggaaaatgtacaacattcaaaattagaagaaaagcacatccaagtaccagagagtattgtgtag

SEQ ID NO: 8637 - DNA, 312 bp, Artificial Sequence
  Synthetic Polynucleotide
ttgcttggagccatggccgcgacgctggtggtcatctgcacagcagtcatcgtggtggtcgcgttgactagaaagaagaaagccctcagaatccattctgtggaaggtgacctcaggagaaaatcagctggacaggaggaatggagccccagtgctccctcacccccaggaagctgtgtccaggcagaagctgcacctgctgggctctgtggagagcagcggggagaggactgtgccgagctgcatgactacttcaatgtcctgagttacagaagcctgggtaactgcagcttcttcacagagactggttag

SEQ ID NO: 8638 - DNA, 369 bp, Artificial Sequence; identical to SEQ ID NO: 8602
  Synthetic Polynucleotide

SEQ ID NO: 8639 - DNA, 327 bp, Artificial Sequence
  Synthetic Polynucleotide
gtcctcctgtgtctcctgttggtgcccctcctgctcagtctctttgtactggggctatttctttggtttctgaagagagagagacaagaagagtacattgaagagaagaagagagtggacatttgtcgggaaactcctaacatatgcccccattctggagagaacacagagtacgacacaatccctcacactaatagaacaatcctaaaggaagatccagcaaatacggtttactccactgtggaaataccgaaaaagatggaaaatccccactcactgctcacgatgccagacacaccaaggctatttgcctatgagaatgttatc

SEQ ID NO: 8640 - DNA, 210 bp, Artificial Sequence
  Synthetic Polynucleotide
atccttgtgatcttctctggaatgttccttgttttcaccctggccggggccctgttcctccatcaacgaaggaaatatagatcaaacaaaggagaaagtcctgtggagcctgcagagccttgtcattacagctgccccagggaggaggagggcagcaccatccccatccaggaggattaccgaaaaccggagcctgcctgctccccctga

SEQ ID NO: 8641 - DNA, 369 bp, Artificial Sequence
  Synthetic Polynucleotide
attctcatcggggtctcagtggtcttcctcttctgtctcctcctcctggtcctcttctgcctccatcgccagaatcagataaagcaggggccccccagaagcaaggacgaggagcagaagccacagcagaggcctgacctggctgttgatgttctagagaggacagcagacaaggccacagtcaatggacttcctgagaaggacagagagacggacacctcggccctggctgcagggagttcccaggaggtgacgtatgctcagctggaccactgggccctcacacagaggacagcccgggctgtgtccccacagtccacaaagcccatggccgagtccatcacgtatgcagccgttgccagacactga

SEQ ID NO: 8642 - DNA, 582 bp, Artificial Sequence
  Synthetic Polynucleotide
ctgggggttgtgatcggcatcttggtggccgtcatcctactgctcctcctcctcctcctcctcttcctcatcctccgacatcgacgtcagggcaaacactggacatcgacccagagaaaggctgatttccaacatcctgcaggggctgtggggccagagcccacagacagaggcctgcagtggaggtccagcccagctgccgatgcccaggaagaaaacctctatgctgccgtgaagcacacacagcctgaggatggggtggagatggacactcggcagagcccacacgatgaagacccccaggcagtgacgtatgccgaggtgaaacactccagacctaggagagaaatggcctctcctccttccccactgtctggggaattcctggacacaaaggacagacaggcggaagaggacaggcagatggacactgaggctgctgcatctgaagccccccaggatgtgacctacgcccagctgcacagcttgaccctcagacgggaggcaactgagcctcctccatcccaggaagggccctctccagctgtgcccagcatctacgccactctggccatccactag

SEQ ID NO: 8643 - DNA, 207 bp, Artificial Sequence
  Synthetic Polynucleotide
atcatctcattttttctcgctctcacatcaaccgctttgctgttcctgctcttttttctcaccctccggttctccgtggttaagagaggccggaaaaaactcctctatatctttaaacagccctttatgcgcccggtccaaacaacccaagaggaagatggctgctcttgcagattcccggaagaggaagaaggcggctgcgagctg

SEQ ID NO: 8644 - DNA, 204 bp, Artificial Sequence
  Synthetic Polynucleotide
ttttgggttctcgtcgtcgtcggcggagtcctggcttgttattctctgcttgtgacagtcgcctttatcatattctgggtccgctccaagagaagcagactgctccactccgattatatgaatatgacacccaggcggccagggcctacacggaaacactatcaaccctacgctccacctcgggatttcgctgcctacagatca

SEQ ID NO: 8645 - DNA, 189 bp, Artificial Sequence
  Synthetic Polynucleotide
gtggctgctatccttggattgggcctcgttctcggactgttgggaccacttgcaatcctgctggctctctatctgctgcggcgggatcagagactccctccagatgctcataagccacctggcggcggatctttcaggaccccaattcaagaagaacaagccgacgctcactctaccctggctaagatc

SEQ ID NO: 8646 - DNA, 441 bp, Artificial Sequence
  Synthetic Polynucleotide
ttttgggttctcgtcgtcgtcggcggagtcctggcttgttattctctgcttgtgacagtcgcctttatcatattctgggtctggcggcgcaaacggaaagagaaacagtctgagacttccccgaaagagtttctcacgatatacgaagatgtcaaggacctcaagacccgccgcaaccatgagcaagaacagacattcccaggcggaggctccacaatctactccatgattcagtcccagtctagcgccccaacctctcaagagcctgcttataccctgtacagtctgattcagccctccagaaagtccggctctcggaagaggaaccactctcctagcttcaactccaccatatatgaagtcattggcaagtctcagcccaaagcacagaatcctgccaggctgagcagaaaagaacttgagaatttcgacgtctactcc

SEQ ID NO: 8647 - DNA, 279 bp, Artificial Sequence
  Synthetic Polynucleotide
agcagctccccaatgggcattattgtggccgtcgtgaccggaattgctgtggccgcaatcgtggcagctgtcgtcgctctgatctattgcagaaagaagcggatcagcgccctgccagggtatcctgagtgccgcgaaatgggcgaaactctgcctgagaaacctgctaaccccacaaatcccgatgaagctgacaaagtcggcgctgaaaacacgatcacatactccctgctcatgcatcctgacgctcttgaggaacctgacgatcagaaccggatc

SEQ ID NO: 8648 - DNA, 246 bp, Artificial Sequence
  Synthetic Polynucleotide
gtcctgttctatctggctgtggggattatgttccttgtgaataccgtgctctgggttaccattcggaaagaactcaagcgcaagaaaaaatgggatcttgagataagcctggacagcgggcatgagaagaaagtcatcagttcccttcaagaggacagacatctcgaagaggaactcaaatgtcaagaacaaaaagaagaacaactccaagagggtgtccatcggaaagagccacagggcgctaca

SEQ ID NO: 8649 - DNA, 69 bp, Artificial Sequence; identical to SEQ ID NO: 1447
  Synthetic Polynucleotide

SEQ ID NO: 8650 - DNA, 69 bp, Artificial Sequence; identical to SEQ ID NO: 1457
  Synthetic Polynucleotide

SEQ ID NO: 8651 - DNA, 81 bp, Artificial Sequence; identical to SEQ ID NO: 8615
  Synthetic Polynucleotide

SEQ ID NO: 8652 - DNA, 63 bp, Artificial Sequence; identical to SEQ ID NO: 1379
  Synthetic Polynucleotide

SEQ ID NO: 8653 - DNA, 63 bp, Artificial Sequence; identical to SEQ ID NO: 1393
  Synthetic Polynucleotide

SEQ ID NO: 8654 - DNA, 63 bp, Artificial Sequence; identical to SEQ ID NO: 1413
  Synthetic Polynucleotide

SEQ ID NO: 8655 - DNA, 63 bp, Artificial Sequence
  Synthetic Polynucleotide
ctgcacattctgattgggacctcagtggtcatcatcctcttcatcctcctcttctttctcctt

SEQ ID NO: 8656 - DNA, 63 bp, Artificial Sequence; identical to SEQ ID NO: 8655
  Synthetic Polynucleotide

SEQ ID NO: 8657 - DNA, 60 bp, Artificial Sequence
  Synthetic Polynucleotide
gttctgattgggacctcagtggtcatcatcctcttcatcctcctcctcttctttctcctt

SEQ ID NO: 8658 - DNA, 63 bp, Artificial Sequence
  Synthetic Polynucleotide
ctgcacattctgattgggacctcagtggctatcatcctcttcatcatcctcttcttctttctc

SEQ ID NO: 8659 - DNA, 63 bp, Artificial Sequence; identical to SEQ ID NO: 8658
  Synthetic Polynucleotide

SEQ ID NO: 8660 - DNA, 75 bp, Artificial Sequence
  Synthetic Polynucleotide
ctgcacattctgattgggacctcagtggtcatcatcctcttcatcctcctcctcttctttctccttcatctctgg

SEQ ID NO: 8661 - DNA, 60 bp, Artificial Sequence
  Synthetic Polynucleotide
gttctgattgggacctcagtggtcatcttcctcttcatcctcctcctcttctttctcctt

SEQ ID NO: 8662 - DNA, 60 bp, Artificial Sequence; identical to SEQ ID NO: 8661
  Synthetic Polynucleotide

SEQ ID NO: 8663 - DNA, 63 bp, Artificial Sequence
  Synthetic Polynucleotide
cacgttctgattgggacctcagtggtcatcatcccctttgctatcctcctcttctttctcctt

SEQ ID NO: 8664 - DNA, 63 bp, Artificial Sequence
  Synthetic Polynucleotide
gctgtgattaggtactcagtggccatcatcctctttaccatccttcccttctttctccttcat

SEQ ID NO: 8665 - DNA, 63 bp, Artificial Sequence; identical to SEQ ID NO: 8664
  Synthetic Polynucleotide

SEQ ID NO: 8666 - DNA, 57 bp, Artificial Sequence
  Synthetic Polynucleotide
gttctgattgggacctcagtggtcaaaatccctttcaccatcctcctcttctttctc

SEQ ID NO: 8667 - DNA, 60 bp, Artificial Sequence
  Synthetic Polynucleotide
gttctgattgggacctcagtggtcaaaatccctttcaccatcctcctcttctttctcctt

SEQ ID NO: 8668 - DNA, 57 bp, Artificial Sequence
  Synthetic Polynucleotide
gttctgattgggacctcagtggtcaaactccctttcaccatcctcctcttctttctc

SEQ ID NO: 8669 - DNA, 72 bp, Artificial Sequence
  Synthetic Polynucleotide
ctgcacgtgctgatcggaaccagcgtggtcaagatcccctttacaatcctgctgttctttctgctccatcgg

SEQ ID NO: 8670 - DNA, 57 bp, Artificial Sequence; identical to SEQ ID NO: 8668
  Synthetic Polynucleotide

SEQ ID NO: 8671 - DNA, 66 bp, Artificial Sequence
  Synthetic Polynucleotide
ctgcacattctgattgggacctcagtggtcaaaatccctttcaccatcctcctcttctttctcctt

SEQ ID NO: 8672 - DNA, 63 bp, Artificial Sequence
  Synthetic Polynucleotide
atcctgctgctcacgctggtgtccttcctcattttcatactcttcatcatagtccagctcttc

SEQ ID NO: 8673 - DNA, 66 bp, Artificial Sequence
  Synthetic Polynucleotide
ttgcttggagccatggccgcgacgctggtggtcatctgcacagcagtcatcgtggtggtcgcgttg

SEQ ID NO: 8674 - DNA, 51 bp, Artificial Sequence
  Synthetic Polynucleotide
gcccagaagctttgcgaagatgttaaaattcaatatacagataccaaaatg

SEQ ID NO: 8675 - DNA, 63 bp, Artificial Sequence
  Synthetic Polynucleotide
gtcctcctgtgtctcctgttggtgcccctcctgctcagtctctttgtactggggctatttctt

SEQ ID NO: 8676 - DNA, 63 bp, Artificial Sequence
  Synthetic Polynucleotide
atccttgtgatcttctctggaatgttccttgttttcaccctggccggggccctgttcctccat

SEQ ID NO: 8677 - DNA, 63 bp, Artificial Sequence
  Synthetic Polynucleotide
attctcatcggggtctcagtggtcttcctcttctgtctcctcctcctggtcctcttctgcctc

SEQ ID NO: 8678 - DNA, 75 bp, Artificial Sequence
  Synthetic Polynucleotide
ctgggggttgtgatcggcatcttggtggccgtcatcctactgctcctcctcctcctcctcctcttcctcatcctc

SEQ ID NO: 8679 - DNA, 81 bp, Artificial Sequence
  Synthetic Polynucleotide
atcatctcattttttctcgctctcacatcaaccgctttgctgttcctgctcttttttctcaccctccggttctccgtggtt

SEQ ID NO: 8680 - DNA, 81 bp, Artificial Sequence
  Synthetic Polynucleotide
ttttgggttctcgtcgtcgtcggcggagtcctggcttgttattctctgcttgtgacagtcgcctttatcatattctgggtc

SEQ ID NO: 8681 - DNA, 63 bp, Artificial Sequence
  Synthetic Polynucleotide
gtggctgctatccttggattgggcctcgttctcggactgttgggaccacttgcaatcctgctg

SEQ ID NO: 8682 - DNA, 81 bp, Artificial Sequence; identical to SEQ ID NO: 8680
  Synthetic Polynucleotide

SEQ ID NO: 8683 - DNA, 69 bp, Artificial Sequence
  Synthetic Polynucleotide
agcagctccccaatgggcattattgtggccgtcgtgaccggaattgctgtggccgcaatcgtggcagct

SEQ ID NO: 8684 - DNA, 63 bp, Artificial Sequence
  Synthetic Polynucleotide
gtcctgttctatctggctgtggggattatgttccttgtgaataccgtgctctgggttaccatt

SEQ ID NO: 8685 - DNA, 75 bp, Artificial Sequence; identical to SEQ ID NO: 1448
  Synthetic Polynucleotide

SEQ ID NO: 8686 - DNA, 75 bp, Artificial Sequence; identical to SEQ ID NO: 1458
  Synthetic Polynucleotide

SEQ ID NO: 8687 - DNA, 12 bp, Artificial Sequence
  Synthetic Polynucleotide
aaaacgaacatc

SEQ ID NO: 8688 - DNA, 135 bp, Artificial Sequence; identical to SEQ ID NO: 1380
  Synthetic Polynucleotide

SEQ ID NO: 8689 - DNA, 189 bp, Artificial Sequence; identical to SEQ ID NO: 1394
  Synthetic Polynucleotide

SEQ ID NO: 8690 - DNA, 75 bp, Artificial Sequence; identical to SEQ ID NO: 1414
  Synthetic Polynucleotide

SEQ ID NO: 8691 - DNA, 252 bp, Artificial Sequence
  Synthetic Polynucleotide
catcgctggtgctccaacaaaaaaaatgctgcggtaatggaccaagagtctgcaggaaacagaacagcgaatagcgaggactctgatgaacaagaccctcaggaggtgacatacacacagttgaatcactgcgttttcacacagagaaaaatcactcgcccttctcagaggcccaagacacccccaacagatatcatcgtgtacacggaacttccaaatgctgagtccagatccaaagttgtctcctgccca

SEQ ID NO: 8692 - DNA, 255 bp, Artificial Sequence
  Synthetic Polynucleotide
catcgctggtgctccaacaaaaaaaatgctgcggtaatggaccaagagtctgcagggaacagaacagcgaatagcgaggactctgatgaacaagaccctcaggaggtgacatacacacagttgaatcactgcgttttcacacagagaaaaatcactcgcccttctcagaggcccaagacacccccaacagatatcatcgtgtacacggaacttccaaatgctgagtccagatccaaagttgtctcctgcccatga

SEQ ID NO: 8693 - DNA, 231 bp, Artificial Sequence
  Synthetic Polynucleotide
catcgctggtgctgcaacaaaaaaaatgctgttgtaatggaccaagagcctgcagggaacagaacagtgaacagggaggactctgatgaacaagaccctcaggaggtgacatatgcacagttgaatcactgcgttttcacacagagaaaaatcactcgcccttctcagaggcccaagacacccccaacagatatcatcgtgtacacggaacttccaaatgctgagccctga

SEQ ID NO: 8694 - DNA, 351 bp, Artificial Sequence
  Synthetic Polynucleotide
cttcattgctgctgctccaacaaaaagaatgctgctgtaatggaccaagagcctgccggggacagaacagtgaacagggaggactctgatgatcaagaccctcaggaggtgacatatgcacagttggatcactgcgttttcacacagacaaaaatcacttccccttctcagaggcccaagacacctccaacagataccaccatgtacatggaacttccaaatgctaagccaagatcattgtctcctgcccataagcaccacagtcaggccttgaggggatcttctagggagacaacagccctgtctcaaaaccgggttgctagctcccatgtaccagcagctggaatctga

SEQ ID NO: 8695 - DNA, 351 bp, Artificial Sequence
  Synthetic Polynucleotide
cttcattgctgctgctccaacaaaaagaatgctgctgtaatggaccaagggcctgccggggacagaacagtgaacagggaggactctgatgatcaagaccctcaggaggtgacatatgcacagttggatcactgcgttttcacacagacaaaaatcacttccccttctcagaggcccaaggcacctccaacagataccaccatgtacatggaacttccaaatgctaagccaagatcattgtctcctgcccataagcaccacagtcaggccttgaggggatcttctagggagacaacagccctgtctcaaaaccgggttgctagctcccatgtaccagcagctggaatctga

SEQ ID NO: 8696 - DNA, 246 bp, Artificial Sequence
  Synthetic Polynucleotide
tgctccaacaaaaaaaatgctgctgtaatggaccaagagcctgcagggaacagaacagccaacagcgaggactctgatgaacaagaccctgaggaggtgacatacgcacagttggatcactgcgttttcacacagagaaaaatcactcgcccttctcagaggcccaagacaccccctacagataccatcttgtacacggaacttccaaatgctaagcccagatccaaagttgtctcctgcccatga

SEQ ID NO: 8697 - DNA, 288 bp, Artificial Sequence
  Synthetic Polynucleotide
tatcgctggtgctccaacaaaaagaatgctgctgtaatggaccaagagcctgcgggggacagaacagtgaataggcaggactctgatgaacaagaccctcaggaggtgacgtacgcacagttggatcactgcgttttcatacagagaaaaatcagtcgcccttctcagaggcccaagacacccctaacagataccagcgtgtacacggaacttccaaatgctgagcccagatccaaagttgtctcctgcccacgagcaccacagtcaggtcttgagggggttttctag

SEQ ID NO: 8698 - DNA, 288 bp, Artificial Sequence; identical to SEQ ID NO: 8697
  Synthetic Polynucleotide

SEQ ID NO: 8699 - DNA, 201 bp, Artificial Sequence
  Synthetic Polynucleotide
catcgctggtgtgccaacaaaaagaatgctgttgtaatggaccaagagcctgcagggaacagaacagtgaacagggaggactctgatgaacaagaccctcaggaggtgacatacgcacagttgaatcactgcgttttcacacagagaaaaatcactcgcccttctcagaggcccaagacacccccaacagataccagcgtg

SEQ ID NO: 8700 - DNA, 345 bp, Artificial Sequence
  Synthetic Polynucleotide
cgctggtgctccaaaaaaaaaaatgctgctgtaatgaaccaagagcctgcgggacacagaacagtgaacagggaggactctgatgaacaagaccctcaggaggtgacatacgcacagttggatcactgcattttcacacagagaaaaatcactggcccttctcagaggagcaagagaccctcaacagataccagcgtgtgtatagaacttccaaatgctgagcccagagcgttgtctcctgcccatgagcaccacagtcaggccttgatgggatcttctagggagacaacagccctgtctcaaacccagcttgccagctctaatgtaccagcagctggaatctga

SEQ ID NO: 8701 - DNA, 33 bp, Artificial Sequence
  Synthetic Polynucleotide
cgctggtgctccaaaaaaaaaatgctgctgtaa

SEQ ID NO: 8702 - DNA, 120 bp, Artificial Sequence
  Synthetic Polynucleotide
cttcatcgctggtgctccgacaaaaaaaatgctgctgtaatggaccaagagcctgcagggaacagaacagtgaacagcgaggattctgatgaacaagaccatcaggaggtgtcatacgca

SEQ ID NO: 8703 - DNA, 117 bp, Artificial Sequence
  Synthetic Polynucleotide
catcgctggtgctccaacaaaaaaaatgctgctgtaatggaccaagagcctgcagggaacagaacagtgaacagcgaggattctgatgaacaagaccatcaggaggtgtcatacgca

SEQ ID NO: 8704 - DNA, 120 bp, Artificial Sequence
  Synthetic Polynucleotide
cttcatcgctggtgctccgacaaaaaaaatgcatctgtaatggaccaagggcctgcggggaacagaacagtgaacagggaggattctgacgaacaggaccatcaggaggtgtcatacgca

SEQ ID NO: 8705 - DNA, 117 bp, Artificial Sequence
  Synthetic Polynucleotide
catcggtggtgcagcgacaagaaaaacgccgccgtgatggaccaagagcctgccggcaatagaaccgtgaacagcgaggatagcgacgagcaggaccaccaagaggtgtcctatgct

SEQ ID NO: 8706 - DNA, 123 bp, Artificial Sequence
  Synthetic Polynucleotide
cttcatcgctggtgctccaacaaaaaaaatgcatctgtaatggaccaagggcctgcggggaacagaacagtgaacagggaggattctgatgaacaggaccatcaggaggtgtcatacgcataa

SEQ ID NO: 8707 - DNA, 66 bp, Artificial Sequence
  Synthetic Polynucleotide
catcgctggtgctccaacaaaaaaaaatgctgctgtaatggaccaagagcctgcagggaacagaag

SEQ ID NO: 8708 - DNA, 258 bp, Artificial Sequence
  Synthetic Polynucleotide
atcatgaagctgaggaaagcacatgtgatatggaagaaagaaaacgaagtttcagaacacacactagaaagttacagatcaaggtcaaataatgaagaaacatcatctgaagagaaaaatggccaatcttcccaccctatgcgttgcatgaactacatcacaaagttgtactcagaagcaaaaacaaagaggaaggaaaatgtacaacattcaaaattagaagaaaagcacatccaagtaccagagagtattgtgtag

SEQ ID NO: 8709 - DNA, 246 bp, Artificial Sequence
  Synthetic Polynucleotide
actagaaagaagaaagccctcagaatccattctgtggaaggtgacctcaggagaaaatcagctggacaggaggaatggagccccagtgctccctcacccccaggaagctgtgtccaggcagaagctgcacctgctgggctctgtggagagcagcggggagaggactgtgccgagctgcatgactacttcaatgtcctgagttacagaagcctgggtaactgcagcttcttcacagagactggttag

SEQ ID NO: 8710 - DNA, 318 bp, Artificial Sequence
  Synthetic Polynucleotide
attctgtttatggtttctgggatatgcatagtcttcggtttcatcatactgctgttacttgttttgaggaaaagaagagattccctatctttgtctactcagcgaacacagggccccgcagagtccgcaaggaacctagagtatgtttcagtgtctccaacgaacaacactgtgtatgcttcagtcactcattcaaacagggaaacagaaatctggacacctagagaaaatgatactatcacaatttactccacaattaatcattccaaagagagtaaacccactttttccagggcaactgcccttgacaatgtcgtg

SEQ ID NO: 8711 - DNA, 1005 bp, Artificial Sequence
  Synthetic Polynucleotide
atggctggttccccaacatgcctcaccctcatctatatcctttggcagctcacagggtcagcagcctctggacccgtgaaagagctggtcggttccgttggtggggccgtgactttccccctgaagtccaaagtaaagcaagttgactctattgtctggaccttcaacacaacccctcttgtcaccatacagccagaagggggcactatcatagtgacccaaaatcgtaatagggagagagtagacttcccagatggaggctactccctgaagctcagcaaactgaagaagaatgactcagggatctactatgtggggatatacagctcatcactccagcagccctccacccaggagtacgtgctgcatgtctacgagcacctgtcaaagcctaaagtcaccatgggtctgcagagcaataagaatggcacctgtgtgaccaatctgacatgctgcatggaacatggggaagaggatgtgatttatacctggaaggccctggggcaagcagccaatgagtcccataatgggtccatcctccccatctcctggagatggggagaaagtgatatgaccttcatctgcgttgccaggaaccctgtcagcagaaacttctcaagccccatccttgccaggaagctctgtgaaggtgctgctgatgacccagattcctccatggtcctcctgtgtctcctgttggtgcccctcctgctcagtctctttgtactggggctatttctttggtttctgaagagagagagacaagaagagtacattgaagagaagaagagagtggacatttgtcgggaaactcctaacatatgcccccattctggagagaacacagagtacgacacaatccctcacactaatagaacaatcctaaaggaagatccagcaaatacggtttactccactgtggaaataccgaaaaagatggaaaatccccactcactgctcacgatgccagacacaccaaggctatttgcctatgagaatgttatc

SEQ ID NO: 8712 - DNA, 147 bp, Artificial Sequence
  Synthetic Polynucleotide
caacgaaggaaatatagatcaaacaaaggagaaagtcctgtggagcctgcagagccttgtcattacagctgccccagggaggaggagggcagcaccatccccatccaggaggattaccgaaaaccggagcctgcctgctccccctga

SEQ ID NO: 8713 - DNA, 306 bp, Artificial Sequence
  Synthetic Polynucleotide
catcgccagaatcagataaagcaggggccccccagaagcaaggacgaggagcagaagccacagcagaggcctgacctggctgttgatgttctagagaggacagcagacaaggccacagtcaatggacttcctgagaaggacagagagacggacacctcggccctggctgcagggagttcccaggaggtgacgtatgctcagctggaccactgggccctcacacagaggacagcccgggctgtgtccccacagtccacaaagcccatggccgagtccatcacgtatgcagccgttgccagacactga

SEQ ID NO: 8714 - DNA, 507 bp, Artificial Sequence
  Synthetic Polynucleotide
cgacatcgacgtcagggcaaacactggacatcgacccagagaaaggctgatttccaacatcctgcaggggctgtggggccagagcccacagacagaggcctgcagtggaggtccagcccagctgccgatgcccaggaagaaaacctctatgctgccgtgaagcacacacagcctgaggatggggtggagatggacactcggcagagcccacacgatgaagacccccaggcagtgacgtatgccgaggtgaaacactccagacctaggagagaaatggcctctcctccttccccactgtctggggaattcctggacacaaaggacagacaggcggaagaggacaggcagatggacactgaggctgctgcatctgaagccccccaggatgtgacctacgcccagctgcacagcttgaccctcagacgggaggcaactgagcctcctccatcccaggaagggccctctccagctgtgcccagcatctacgccactctggccatccactag

SEQ ID NO: 8715 - DNA, 126 bp, Artificial Sequence
  Synthetic Polynucleotide
aagagaggccggaaaaaactcctctatatctttaaacagccctttatgcgcccggtccaaacaacccaagaggaagatggctgctcttgcagattcccggaagaggaagaaggcggctgcgagctg

SEQ ID NO: 8716 - DNA, 123 bp, Artificial Sequence
  Synthetic Polynucleotide
cgctccaagagaagcagactgctccactccgattatatgaatatgacacccaggcggccagggcctacacggaaacactatcaaccctacgctccacctcgggatttcgctgcctacagatca

SEQ ID NO: 8717 - DNA, 126 bp, Artificial Sequence
  Synthetic Polynucleotide
gctctctatctgctgcggcgggatcagagactccctccagatgctcataagccacctggcggcggatctttcaggaccccaattcaagaagaacaagccgacgctcactctaccctggctaagatc

SEQ ID NO: 8718 - DNA, 360 bp, Artificial Sequence
  Synthetic Polynucleotide
tggcggcgcaaacggaaagagaaacagtctgagacttccccgaaagagtttctcacgatatacgaagatgtcaaggacctcaagacccgccgcaaccatgagcaagaacagacattcccaggcggaggctccacaatctactccatgattcagtcccagtctagcgccccaacctctcaagagcctgcttataccctgtacagtctgattcagccctccagaaagtccggctctcggaagaggaaccactctcctagcttcaactccaccatatatgaagtcattggcaagtctcagcccaaagcacagaatcctgccaggctgagcagaaaagaacttgagaatttcgacgtctactcc

SEQ ID NO: 8719 - DNA, 210 bp, Artificial Sequence
  Synthetic Polynucleotide
gtcgtcgctctgatctattgcagaaagaagcggatcagcgccctgccagggtatcctgagtgccgcgaaatgggcgaaactctgcctgagaaacctgctaaccccacaaatcccgatgaagctgacaaagtcggcgctgaaaacacgatcacatactccctgctcatgcatcctgacgctcttgaggaacctgacgatcagaaccggatc

SEQ ID NO: 8720 - DNA, 183 bp, Artificial Sequence
  Synthetic Polynucleotide
cggaaagaactcaagcgcaagaaaaaatgggatcttgagataagcctggacagcgggcatgagaagaaagtcatcagttcccttcaagaggacagacatctcgaagaggaactcaaatgtcaagaacaaaaagaagaacaactccaagagggtgtccatcggaaagagccacagggcgctaca

SEQ ID NO: 8721 - DNA, 429 bp, Artificial Sequence; identical to SEQ ID NO: 1089
  Synthetic Polynucleotide

SEQ ID NO: 8722 - DNA, 555 bp, Artificial Sequence; identical to SEQ ID NO: 1100
  Synthetic Polynucleotide

SEQ ID NO: 8723 - DNA, 552 bp, Artificial Sequence; identical to SEQ ID NO: 1099
  Synthetic Polynucleotide

SEQ ID NO: 8724 - DNA, 537 bp, Artificial Sequence
  Synthetic Polynucleotide
cagagcttcggcctgctggaccccaagctgtgctacctgctggatggcatcctgttcatctacggcgtgatcctgaccgccctgttcctgagggaccaaagactgcctcctgacgctcacaaacctccaggcggaggcagcttcagaacccctatccaagaggaacaggctgacgcccacagcaccctggcaaaaattagagtgaagttcagcagaagcgccgacgcccctgcctaccagcagggacagaaccaactgtacaacgagctgaacctgggcagacgggaagagtacgacgtgctggacaagcggagaggcagggaccctgagatgggcggaaagccccagcggagaaagaacccccaggaaggactgtataacgaactccagaaagacaagatggccgaagcctacagcgagatcggcatgaagggcgagcggagaagaggcaagggccacgatggcctgtaccagggcctgagcaccgccaccaaggacacctatgacgccctgcacatgcaggccctgcctccaaga

SEQ ID NO: 8725 - DNA, 789 bp, Artificial Sequence
  Synthetic Polynucleotide
cagagcttcggcctgctggaccccaagctgtgctacctgctggatggcatcctgttcatctacggcgtgatcctgaccgccctgttcctgtggcggcggaagcggaaagagaagcagtctgagacaagccccaaagagttcctgaccatctacgaggacgtgaaggacctgaaaacccggcggaaccacgaacaagagcagacctttcctggcggaggcagcaccatctacagcatgatccagagccagagcagcgcccctacaagccaagagcctgcctacacactgtactccctgatccagcctagcagaaagagcggcagccggaagagaaatcacagccccagcttcaacagcacgatctacgaagtgatcggcaagagccagccaaaggctcagaaccctgccagactgagccggaaagagctggaaaacttcgacgtgtacagcagagtgaagttcagcagaagcgccgacgcccctgcctaccagcagggacagaaccaactgtacaacgagctgaacctgggcagacgggaagagtacgacgtgctggacaagcggagaggcagggaccctgagatgggcggaaagccccagcggagaaagaacccccaggaaggactgtataacgaactccagaaagacaagatggccgaagcctacagcgagatcggcatgaagggcgagcggagaagaggcaagggccacgatggcctgtaccagggcctgagcaccgccaccaaggacacctatgacgccctgcacatgcaggccctgcctccaaga

SEQ ID NO: 8726 - DNA, 552 bp, Artificial Sequence; identical to SEQ ID NO: 1099
  Synthetic Polynucleotide

SEQ ID NO: 8727 - DNA, 555 bp, Artificial Sequence; identical to SEQ ID NO: 1100
  Synthetic Polynucleotide

SEQ ID NO: 8728 - DNA, 552 bp, Artificial Sequence; identical to SEQ ID NO: 1101
  Synthetic Polynucleotide

SEQ ID NO: 8729 - DNA, 555 bp, Artificial Sequence; identical to SEQ ID NO: 1102
  Synthetic Polynucleotide

SEQ ID NO: 8730 - DNA, 429 bp, Artificial Sequence
  Synthetic Polynucleotide
cagagcttcggcctgctggaccccaagctgagctacctgctggatggcatcctgttcatctacggcgtgatcctgaccgccctgttcctgagagtgaagttcagcagaagcgccgacgcccctgcctaccagcagggacagaaccaactgtacaacgagctgaacctgggcagacgggaagagtacgacgtgctggacaagcggagaggcagggaccctgagatgggcggaaagccccagcggagaaagaacccccaggaaggactgtataacgaactccagaaagacaagatggccgaagcctacagcgagatcggcatgaagggcgagcggagaagaggcaagggccacgatggcctgtaccagggcctgagcaccgccaccaaggacacctatgacgccctgcacatgcaggccctgcctccaaga

SEQ ID NO: 8731 - DNA, 429 bp, Artificial Sequence
  Synthetic Polynucleotide
cagagttttgggttgttggaccctaaattgagctatctgttggacggaatcctgttcatttacggagtgatcctgaccgcattgttcctgcgggttaagttttccagatccgcagacgcacccgcttaccaacaagggcagaaccaactctacaatgaacttaatttggggcggagggaagagtacgacgttctggacaaaaggaggggacgagatcccgagatgggcggaaagcctcagcgaaggaagaatccgcaagaggggctttataacgaactccagaaagataaaatggcagaagcctatagtgagattgggatgaagggagaaaggaggaggggtaaaggtcacgatgggttgtaccaaggattgagcacagccactaaagatacctatgatgcgctccacatgcaggccctgccgccaaga

SEQ ID NO: 8732 - DNA, 429 bp, Artificial Sequence
  Synthetic Polynucleotide
cagagcttcggcctgctggaccccaagctgtgctacctgctggatggcatcctgttcatctacggcgtgatcctgaccgccctgttcctgagagtgaagttcagcagaagcgccgacgcccctgcctaccagcagggacagaaccaactgtacaacgagctgaacctgggcagacgggaagagtacgacgtgctggacaagcggagaggcagggaccctgagatgggcggaaagccccagcggagaaagaacccccaggaaggactgttcaacgaactccagaaagacaagatggccgaagccttcagcgagatcggcatgaagggcgagcggagaagaggcaagggccacgatggcctgttccagggcctgagcaccgccaccaaggacaccttcgacgccctgcacatgcaggccctgcctccaaga

SEQ ID NO: 8733 - DNA, 222 bp, Artificial Sequence; identical to SEQ ID NO: 1349
  Synthetic Polynucleotide

SEQ ID NO: 8734 - DNA, 348 bp, Artificial Sequence
  Synthetic Polynucleotide
acaacacctggcgagagaagtagcctgcctgccttctatcctggcaccagcggctcttgttctggctgtggatctctgagcctgcctctgctggctggactggttgctgctgatgctgtggcctctctgctgattgtgggagccgtgttcaaacggggcagaaagaaactcctgtatatattcaaacaaccatttatgagaccagtacaaactactcaagaggaagatggctgtagctgccgatttccagaagaagaagaaggaggatgtgaactgctgtgcgccagacctagaagaagccccgctcaagaggacggcaaggtgtacatcaacatgcccggcagagga

SEQ ID NO: 8735 - DNA, 345 bp, Artificial Sequence
  Synthetic Polynucleotide
acaacacctggcgagagaagtagcctgcctgccttctatcctggcaccagcggctcttgttctggctgtggatctctgagcctgcctctgctggctggactggttgctgctgatgctgtggcctctctgctgattgtgggagccgtgttcaggagtaagaggagcaggctcctgcacagtgactacatgaacatgactccacgccgccccggacccacccgcaagcattaccagccctatgccccaccacgcgacttcgcagcctatcgctccctgtgcgccagacctagaagaagccccgctcaagaggacggcaaggtgtacatcaacatgcccggcagagga

SEQ ID NO: 8736 - DNA, 330 bp, Artificial Sequence
  Synthetic Polynucleotide
acaacacctggcgagagaagtagcctgcctgccttctatcctggcaccagcggctcttgttctggctgtggatctctgagcctgcctctgctggctggactggttgctgctgatgctgtggcctctctgctgattgtgggagccgtgttcagggaccaaagactgcctcctgacgctcacaaacctccaggcggaggcagcttcagaacccctatccaagaggaacaggctgacgcccacagcaccctggcaaaaattctgtgcgccagacctagaagaagccccgctcaagaggacggcaaggtgtacatcaacatgcccggcagagga

SEQ ID NO: 8737 - DNA, 582 bp, Artificial Sequence
  Synthetic Polynucleotide
acaacacctggcgagagaagtagcctgcctgccttctatcctggcaccagcggctcttgttctggctgtggatctctgagcctgcctctgctggctggactggttgctgctgatgctgtggcctctctgctgattgtgggagccgtgttctggcggcggaagcggaaagagaagcagtctgagacaagccccaaagagttcctgaccatctacgaggacgtgaaggacctgaaaacccggcggaaccacgaacaagagcagacctttcctggcggaggcagcaccatctacagcatgatccagagccagagcagcgcccctacaagccaagagcctgcctacacactgtactccctgatccagcctagcagaaagagcggcagccggaagagaaatcacagccccagcttcaacagcacgatctacgaagtgatcggcaagagccagccaaaggctcagaaccctgccagactgagccggaaagagctggaaaacttcgacgtgtacagcctgtgcgccagacctagaagaagccccgctcaagaggacggcaaggtgtacatcaacatgcccggcagagga

SEQ ID NO: 8738 - DNA, 330 bp, Artificial Sequence
  Synthetic Polynucleotide
ctgggagagcctcagctgtgctatatcctggacgccatcctgtttctgtacggcatcgtgctgaccctgctgtactgcaaacggggcagaaagaaactcctgtatatattcaaacaaccatttatgagaccagtacaaactactcaagaggaagatggctgtagctgccgatttccagaagaagaagaaggaggatgtgaactgcggctgaagatccaagtgcggaaggccgccatcaccagctacgagaaatccgacggcgtgtacaccggcctgagcaccagaaatcaagagacatacgagacactgaagcacgaaaagcctccacaa

SEQ ID NO: 8739 - DNA, 327 bp, Artificial Sequence
  Synthetic Polynucleotide
ctgggagagcctcagctgtgctatatcctggacgccatcctgtttctgtacggcatcgtgctgaccctgctgtactgcaggagtaagaggagcaggctcctgcacagtgactacatgaacatgactccacgccgccccggacccacccgcaagcattaccagccctatgccccaccacgcgacttcgcagcctatcgctcccggctgaagatccaagtgcggaaggccgccatcaccagctacgagaaatccgacggcgtgtacaccggcctgagcaccagaaatcaagagacatacgagacactgaagcacgaaaagcctccacaa

SEQ ID NO: 8740 - DNA, 312 bp, Artificial Sequence
  Synthetic Polynucleotide
ctgggagagcctcagctgtgctatatcctggacgccatcctgtttctgtacggcatcgtgctgaccctgctgtactgcagggaccaaagactgcctcctgacgctcacaaacctccaggcggaggcagcttcagaacccctatccaagaggaacaggctgacgcccacagcaccctggcaaaaattcggctgaagatccaagtgcggaaggccgccatcaccagctacgagaaatccgacggcgtgtacaccggcctgagcaccagaaatcaagagacatacgagacactgaagcacgaaaagcctccacaa

SEQ ID NO: 8741 - DNA, 564 bp, Artificial Sequence
  Synthetic Polynucleotide
ctgggagagcctcagctgtgctatatcctggacgccatcctgtttctgtacggcatcgtgctgaccctgctgtactgctggcggcggaagcggaaagagaagcagtctgagacaagccccaaagagttcctgaccatctacgaggacgtgaaggacctgaaaacccggcggaaccacgaacaagagcagacctttcctggcggaggcagcaccatctacagcatgatccagagccagagcagcgcccctacaagccaagagcctgcctacacactgtactccctgatccagcctagcagaaagagcggcagccggaagagaaatcacagccccagcttcaacagcacgatctacgaagtgatcggcaagagccagccaaaggctcagaaccctgccagactgagccggaaagagctggaaaacttcgacgtgtacagccggctgaagatccaagtgcggaaggccgccatcaccagctacgagaaatccgacggcgtgtacaccggcctgagcaccagaaatcaagagacatacgagacactgaagcacgaaaagcctccacaa

SEQ ID NO: 8742 - DNA, 330 bp, Artificial Sequence
  Synthetic Polynucleotide
ctcggagaaccacagctctgttacattctggatgctatcctgttcctctatgggatcgtcctgacactcctgtattgcaagagaggccggaagaagctgctgtacatcttcaagcagcctttcatgcggcccgtgcagaccacccaggaagaggacggctgctcctgccggttccccgaggaagaagaaggcggctgcgagctgagactcaaaattcaagttcgcaaagccgccattacctcttacgagaagagtgatggggtgtacacaggactgtctacccggaatcaagaaacctacgaaaccctcaaacatgagaagccacctcag

SEQ ID NO: 8743 - DNA, 327 bp, Artificial Sequence
  Synthetic Polynucleotide
ctcggagaaccacagctctgttacattctggatgctatcctgttcctctatgggatcgtcctgacactcctgtattgcaggagcaagcggtcacggctgctccacagcgattacatgaatatgacaccacgaagaccgggtcctactcgcaaacactaccaaccctacgcacctccccgcgactttgcagcgtaccgatctagactcaaaattcaagttcgcaaagccgccattacctcttacgagaagagtgatggggtgtacacaggactgtctacccggaatcaagaaacctacgaaaccctcaaacatgagaagccacctcag

SEQ ID NO: 8744 - DNA, 204 bp, Artificial Sequence; identical to SEQ ID NO: 1423
  Synthetic Polynucleotide

SEQ ID NO: 8745 - DNA, 204 bp, Artificial Sequence; identical to SEQ ID NO: 1425
  Synthetic Polynucleotide

SEQ ID NO: 8746 - DNA, 258 bp, Artificial Sequence; identical to SEQ ID NO: 1362
  Synthetic Polynucleotide

SEQ ID NO: 8747 - DNA, 258 bp, Artificial Sequence; identical to SEQ ID NO: 1366
  Synthetic Polynucleotide

SEQ ID NO: 8748 - DNA, 384 bp, Artificial Sequence
  Synthetic Polynucleotide
caggctcagagcgattgcagctgtagcacagtgtctccaggcgtgctggccggaattgtgatgggcgatctggtgctgacagtgctgattgccctggccgtgtacttcctgggtagactggtgcctagaggaagaggcgctgccgaagccgccacaagaaagcagagaatcaccgagacagagagcccctaccaagagctgcaaggccagagaagcgacgtgtacagcgacctgaatacccagaaacggggcagaaagaaactcctgtatatattcaaacaaccatttatgagaccagtacaaactactcaagaggaagatggctgtagctgccgatttccagaagaagaagaaggaggatgtgaactgcggccttactacaaa

SEQ ID NO: 8749 - DNA, 381 bp, Artificial Sequence
  Synthetic Polynucleotide
caggctcagagcgattgcagctgtagcacagtgtctccaggcgtgctggccggaattgtgatgggcgatctggtgctgacagtgctgattgccctggccgtgtacttcctgggtagactggtgcctagaggaagaggcgctgccgaagccgccacaagaaagcagagaatcaccgagacagagagcccctaccaagagctgcaaggccagagaagcgacgtgtacagcgacctgaatacccagaggagcaagcggtcacggctgctccacagcgattacatgaatatgacaccacgaagaccgggtcctactcgcaaacactaccaaccctacgcacctccccgcgactttgcagcgtaccgatctcggccttactacaaa

SEQ ID NO: 8750 - DNA, 366 bp, Artificial Sequence
  Synthetic Polynucleotide
caggctcagagcgattgcagctgtagcacagtgtctccaggcgtgctggccggaattgtgatgggcgatctggtgctgacagtgctgattgccctggccgtgtacttcctgggtagactggtgcctagaggaagaggcgctgccgaagccgccacaagaaagcagagaatcaccgagacagagagcccctaccaagagctgcaaggccagagaagcgacgtgtacagcgacctgaatacccagagggaccaaagactgcctcctgacgctcacaaacctccaggcggaggcagcttcagaacccctatccaagaggaacaggctgacgcccacagcaccctggcaaaaattcggccttactacaaa

SEQ ID NO: 8751 - DNA, 618 bp, Artificial Sequence
  Synthetic Polynucleotide
caggctcagagcgattgcagctgtagcacagtgtctccaggcgtgctggccggaattgtgatgggcgatctggtgctgacagtgctgattgccctggccgtgtacttcctgggtagactggtgcctagaggaagaggcgctgccgaagccgccacaagaaagcagagaatcaccgagacagagagcccctaccaagagctgcaaggccagagaagcgacgtgtacagcgacctgaatacccagtggcggcggaagcggaaagagaagcagtctgagacaagccccaaagagttcctgaccatctacgaggacgtgaaggacctgaaaacccggcggaaccacgaacaagagcagacctttcctggcggaggcagcaccatctacagcatgatccagagccagagcagcgcccctacaagccaagagcctgcctacacactgtactccctgatccagcctagcagaaagagcggcagccggaagagaaatcacagccccagcttcaacagcacgatctacgaagtgatcggcaagagccagccaaaggctcagaaccctgccagactgagccggaaagagctggaaaacttcgacgtgtacagccggccttactacaaa

SEQ ID NO: 8752 - DNA, 570 bp, Artificial Sequence
  Synthetic Polynucleotide
acaacgccgggcgaaaggagttccttgccggccttttaccccggcacaagcggaagctgtagtgggtgtggaagcctcagcctcccacttcttgcgggcctcgtcgcggcagatgcagtagcttcacttcttattgtaggcgcggtatttctctgtgctcgaccaaggaggtcacccgctcaggaggatggtaaggtgtatataaatatgccaggacgcggaagctctagacgggttaagttttccagatccgcagacgcacccgcttaccaacaagggcagaaccaactctacaatgaacttaatttggggcggagggaagagtacgacgttctggacaaaaggaggggacgagatcccgagatgggcggaaagcctcagcgaaggaagaatccgcaagaggggctttataacgaactccagaaagataaaatggcagaagcctatagtgagattgggatgaagggagaaaggaggaggggtaaaggtcacgatgggttgtaccaaggattgagcacagccactaaagatacctatgatgcgctccacatgcaggccctgccgccaaga

SEQ ID NO: 8753 - DNA, 582 bp, Artificial Sequence
  Synthetic Polynucleotide
caggctcagagcgattgcagctgtagcacagtgtctccaggcgtgctggccggaattgtgatgggcgatctggtgctgacagtgctgattgccctggccgtgtacttcctgggtagactggtgcctagaggaagaggcgctgccgaagccgccacaagaaagcagagaatcaccgagacagagagcccctaccaagagctgcaaggccagagaagcgacgtgtacagcgacctgaatacccagagagtgaagttcagcagaagcgccgacgcccctgcctaccagcagggacagaaccaactgtacaacgagctgaacctgggcagacgggaagagtacgacgtgctggacaagcggagaggcagggaccctgagatgggcggaaagccccagcggagaaagaacccccaggaaggactgtataacgaactccagaaagacaagatggccgaagcctacagcgagatcggcatgaagggcgagcggagaagaggcaagggccacgatggcctgtaccagggcctgagcaccgccaccaaggacacctatgacgccctgcacatgcaggccctgcctccaaga

SEQ ID NO: 8754 - DNA, 348 bp, Artificial Sequence
  Synthetic Polynucleotide
acaacgccgggcgaaaggagttccttgccggccttttaccccggcacaagcggaagctgtagtgggtgtggaagcctcagcctcccacttcttgcgggcctcgtcgcggcagatgcagtagcttcacttcttattgtaggcgcggtatttaagagaggccggaagaagctgctgtacatcttcaagcagcctttcatgcggcccgtgcagaccacccaggaagaggacggctgctcctgccggttccccgaggaagaagaaggcggctgcgagctgctctgtgctcgaccaaggaggtcacccgctcaggaggatggtaaggtgtatataaatatgccaggacgcgga

SEQ ID NO: 8755 - DNA, 345 bp, Artificial Sequence
  Synthetic Polynucleotide
acaacgccgggcgaaaggagttccttgccggccttttaccccggcacaagcggaagctgtagtgggtgtggaagcctcagcctcccacttcttgcgggcctcgtcgcggcagatgcagtagcttcacttcttattgtaggcgcggtatttaggagcaagcggtcacggctgctccacagcgattacatgaatatgacaccacgaagaccgggtcctactcgcaaacactaccaaccctacgcacctccccgcgactttgcagcgtaccgatctctctgtgctcgaccaaggaggtcacccgctcaggaggatggtaaggtgtatataaatatgccaggacgcgga

SEQ ID NO: 8756 - DNA, 402 bp, Artificial Sequence
  Synthetic Polynucleotide
ctgtgctacctgctggatggcatcctgttcatctacggcgtgatcctgaccgccctgttcctgagagtgaagttcagcagaagcgccgacgcccctgcctaccagcagggacagaaccaactgtacaacgagctgaacctgggcagacgggaagagtacgacgtgctggacaagcggagaggcagggaccctgagatgggcggaaagccccagcggagaaagaacccccaggaaggactgtataacgaactccagaaagacaagatggccgaagcctacagcgagatcggcatgaagggcgagcggagaagaggcaagggccacgatggcctgtaccagggcctgagcaccgccaccaaggacacctatgacgccctgcacatgcaggccctgcctccaaga

SEQ ID NO: 8757 - DNA, 189 bp, Artificial Sequence
  Synthetic Polynucleotide
ctgtgctatatcctggacgccatcctgtttctgtacggcatcgtgctgaccctgctgtactgccggctgaagatccaagtgcggaaggccgccatcaccagctacgagaaatccgacggcgtgtacaccggcctgagcaccagaaatcaagagacatacgagacactgaagcacgaaaagcctccacaa

SEQ ID NO: 8758 - DNA, 135 bp, Artificial Sequence
  Synthetic Polynucleotide
ctgctggctggactggttgctgctgatgctgtggcctctctgctgattgtgggagccgtgttcctgtgcgccagacctagaagaagccccgctcaagaggacggcaaggtgtacatcaacatgcccggcagagga

SEQ ID NO: 8759 - DNA, 219 bp, Artificial Sequence
  Synthetic Polynucleotide
ggcgtgctggccggaattgtgatgggcgatctggtgctgacagtgctgattgccctggccgtgtacttcctgggtagactggtgcctagaggaagaggcgctgccgaagccgccacaagaaagcagagaatcaccgagacagagagcccctaccaagagctgcaaggccagagaagcgacgtgtacagcgacctgaatacccagcggccttactacaaa

SEQ ID NO: 8760 - DNA, 63 bp, Artificial Sequence
  Synthetic Polynucleotide
ctgtgctacctgctggatggcatcctgttcatctacggcgtgatcctgaccgccctgttcctg

SEQ ID NO: 8761 - DNA, 63 bp, Artificial Sequence
  Synthetic Polynucleotide
ctgtgctatatcctggacgccatcctgtttctgtacggcatcgtgctgaccctgctgtactgc

SEQ ID NO: 8762 - DNA, 66 bp, Artificial Sequence
  Synthetic Polynucleotide
ctgctggctggactggttgctgctgatgctgtggcctctctgctgattgtgggagccgtgttcctg

SEQ ID NO: 8763 - DNA, 63 bp, Artificial Sequence
  Synthetic Polynucleotide
ggcgtgctggccggaattgtgatgggcgatctggtgctgacagtgctgattgccctggccgtg

SEQ ID NO: 8764 - DNA, 339 bp, Artificial Sequence; identical to SEQ ID NO: 1563
  Synthetic Polynucleotide

SEQ ID NO: 8765 - DNA, 126 bp, Artificial Sequence; identical to SEQ ID NO: 1560
  Synthetic Polynucleotide

SEQ ID NO: 8766 - DNA, 72 bp, Artificial Sequence
  Synthetic Polynucleotide
ctgtgcgccagacctagaagaagccccgctcaagaggacggcaaggtgtacatcaacatgcccggcagagga

SEQ ID NO: 8767 - DNA, 156 bp, Artificial Sequence
  Synthetic Polynucleotide
tacttcctgggtagactggtgcctagaggaagaggcgctgccgaagccgccacaagaaagcagagaatcaccgagacagagagcccctaccaagagctgcaaggccagagaagcgacgtgtacagcgacctgaatacccagcggccttactacaaa

SEQ ID NO: 8768 - DNA, 1515 bp, Artificial Sequence
  Synthetic Polynucleotide
atggccttaccagtgaccgccttgctcctgccgctggccttgctgctccacgccgccaggccggacatccagatgacacagagccctagcagcctgtctgccagcgtgggagacagagtgaccatcacatgcaaggccagcgaccacatcaacaactggctggcctggtatcagcagaagcctggacaggcccctaagctgctgatctacggcgctaccacactggaaacaggcgtgcccagcagattttctggcagcggctctggcaccgactacaccctgacaatatccagcctccagcctgaggacttcgccacctactactgtcagcagagctggaacaccccttggacattcggccagggcaccaagctggaaatcaagagaggcggaggcggaagtggaggcggaggatctggcggcggaggctctcaagttcagcttcaacagcctggcgctgagctggtcaaacctggcgcttctgtgaagatgagctgcaaagccagcggctacgccttcagcagctactggatcaactggatgaagcagaaacccggccagggactcgaatggatcggccaaatctatcccggcgacggcgacaccaactacaacggcaagttcaagggcagagccacactgaccgccgatacctctagcagcacagcctacatgcagctgagcagcctgaccagcgaagatagcgccgtgtacttctgtgcccggtccatcacaacagtcgtgggctgcgctatggactattggggccagggaacaagcgtgaccgtgtctagtacgcgtggcatgcggactgaagacctcccaaaggctgtggtgttcctggagcctcaatggtacagggtgctggagaaggacagtgtgactctgaagtgccagggagcctactcccctgaggacaattccacacagtggtttcacaatgagagcctcatctcaagccaggcctccagctacttcattgacgctgccacagtggacgacagtggagagtacaggtgccagacaaacctctccaccctcagtgacccggtgcagctagaagtccatatcggctggctgttgctccaggcccctcggtgggtgttcaaggaggaagaccctattcacctgaggtgtcacagctggaagaacactgctctgcataaggtcacatatttacagaatggcaaaggcaggaagtattttcatcataattctgacttctacattccaaaagccacactcaaagacagcggctcctacttctgcagggggcttgttgggagtaaaaatgtgtcttcagagactgtgaacatcaccatcactcaaggtttggcagtgtcaaccatctcatcattctttccacctggctaccaagtgtccttctgcctggtcatggtgctgctgttcgccgtggataccggcctgtacttcagcgtcaagaccaacatccggtccagcaccagagactggaaggaccacaagttcaagtggcggaaggaccctcaggacaag

SEQ ID NO: 8769 - DNA, 1515 bp, Artificial Sequence; identical to SEQ ID NO: 4954
  Synthetic Polynucleotide

SEQ ID NO: 8770 - DNA, 1452 bp, Artificial Sequence
  Synthetic Polynucleotide
atggccttaccagtgaccgccttgctcctgccgctggccttgctgctccacgccgccaggccggacatccagatgacacagagccctagcagcctgtctgccagcgtgggagacagagtgaccatcacatgcaaggccagcgaccacatcaacaactggctggcctggtatcagcagaagcctggacaggcccctaagctgctgatctacggcgctaccacactggaaacaggcgtgcccagcagattttctggcagcggctctggcaccgactacaccctgacaatatccagcctccagcctgaggacttcgccacctactactgtcagcagagctggaacaccccttggacattcggccagggcaccaagctggaaatcaagagaggcggaggcggaagtggaggcggaggatctggcggcggaggctctcaagttcagcttcaacagcctggcgctgagctggtcaaacctggcgcttctgtgaagatgagctgcaaagccagcggctacgccttcagcagctactggatcaactggatgaagcagaaacccggccagggactcgaatggatcggccaaatctatcccggcgacggcgacaccaactacaacggcaagttcaagggcagagccacactgaccgccgatacctctagcagcacagcctacatgcagctgagcagcctgaccagcgaagatagcgccgtgtacttctgtgcccggtccatcacaacagtcgtgggctgcgctatggactattggggccagggaacaagcgtgaccgtgtctagtacgcgtggaatgaggactgaggatcttcccaaagctgtcgtctttctcgaaccccaatggtattctgtgctcgaaaaagactctgtgacactgaaatgccaaggggcctactctcccgaggacaactccacacagtggtttcataatgagaacctcatcagctctcaggccagctcttatttcattgatgccgctacagtgaacgactccggcgagtatcggtgtcagaccaatctgtctacactgtctgaccccgtgcagcttgaggtccacattggatggttgctcttgcaagccccacgctgggttttcaaagaggaagatccaatccatctgcggtgccacagctggaaaaacaccgctctccacaaagtcacatacctgcaaaatggcaaagaccgcaaatacttccatcacaattccgattttcacattccgaaggctaccctgaaagacagcggcagctatttctgccggggactcgtcggctccaagaatgtgtcctccgaaaccgtgaatatcacgattacccaaggactggctgtgtctacaatctctagcttctctccgcctggataccaagtctccttctgtcttgtgatggtcctcctgtttgctgtggacacaggactgtacttttccgtgaaaacgaacatc

SEQ ID NO: 8771 - DNA, 1350 bp, Artificial Sequence
  Synthetic Polynucleotide
atggccttaccagtgaccgccttgctcctgccgctggccttgctgctccacgccgccaggccggacatccagatgacacagagccctagcagcctgtctgccagcgtgggagacagagtgaccatcacatgcaaggccagcgaccacatcaacaactggctggcctggtatcagcagaagcctggacaggcccctaagctgctgatctacggcgctaccacactggaaacaggcgtgcccagcagattttctggcagcggctctggcaccgactacaccctgacaatatccagcctccagcctgaggacttcgccacctactactgtcagcagagctggaacaccccttggacattcggccagggcaccaagctggaaatcaagagaggcggaggcggaagtggaggcggaggatctggcggcggaggctctcaagttcagcttcaacagcctggcgctgagctggtcaaacctggcgcttctgtgaagatgagctgcaaagccagcggctacgccttcagcagctactggatcaactggatgaagcagaaacccggccagggactcgaatggatcggccaaatctatcccggcgacggcgacaccaactacaacggcaagttcaagggcagagccacactgaccgccgatacctctagcagcacagcctacatgcagctgagcagcctgaccagcgaagatagcgccgtgtacttctgtgcccggtccatcacaacagtcgtgggctgcgctatggactattggggccagggaacaagcgtgaccgtgtctagtacgcgtctgtgggtgtcccagccacctgaaattcggacactggaaggctcctccgcctttctgccctgtagctttaacgccagccaggggagactcgccatcggctctgtgacatggttccgggatgaagtcgtccctggaaaagaagttcgcaacggaacaccagagttcagaggcagactcgccccactggcaagctccagattcctgcatgaccatcaggctgaactgcacattagggacgtgcggggccacgatgcctccatctatgtgtgtcgggtcgaagtgcttggactcggcgtcggaactggaaacggcactaggctggtggtcgagaaagaacatccacagcttggcgctggcaccgtcctgttgcttagagccggattctatgccgtcagcttcctgtccgtggctgtggggtctacagtgtattaccagggaaaatgtctcacctggaaaggccccagacgccagcttccagctgttgttcctgctccactgccaccaccttgtggctcctctgctcacttgcttccaccagtgcctggcgga

SEQ ID NO: 8772 - DNA, 1566 bp, Artificial Sequence
  Synthetic Polynucleotide
atggccttaccagtgaccgccttgctcctgccgctggccttgctgctccacgccgccaggccggacatccagatgacacagagccctagcagcctgtctgccagcgtgggagacagagtgaccatcacatgcaaggccagcgaccacatcaacaactggctggcctggtatcagcagaagcctggacaggcccctaagctgctgatctacggcgctaccacactggaaacaggcgtgcccagcagattttctggcagcggctctggcaccgactacaccctgacaatatccagcctccagcctgaggacttcgccacctactactgtcagcagagctggaacaccccttggacattcggccagggcaccaagctggaaatcaagagaggcggaggcggaagtggaggcggaggatctggcggcggaggctctcaagttcagcttcaacagcctggcgctgagctggtcaaacctggcgcttctgtgaagatgagctgcaaagccagcggctacgccttcagcagctactggatcaactggatgaagcagaaacccggccagggactcgaatggatcggccaaatctatcccggcgacggcgacaccaactacaacggcaagttcaagggcagagccacactgaccgccgatacctctagcagcacagcctacatgcagctgagcagcctgaccagcgaagatagcgccgtgtacttctgtgcccggtccatcacaacagtcgtgggctgcgctatggactattggggccagggaacaagcgtgaccgtgtctagtacgcgtcagagcaaggctcaggttctccagagtgtggcaggccagactctgactgtcagatgccagtatccaccaacaggctccctctatgagaaaaaaggatggtgtaaagaggcttctgccctcgtctgcatccggctggttacctctagcaagcccagaactatggcctggacatcccggtttacaatctgggatgaccctgatgccggatttttcacagtgacaatgacggatctgcgcgaggaagattccgggcactattggtgtagaatctacaggccctccgacaactccgtgtctaagtctgtgcgcttttacctggtcgtcagccctgccagtgcctccactcagacatcttggaccccaagggaccttgtgtcctctcagacacagacacagtcctgcgtgccaccaactgctggcgcaagacaggctccagagtctcccagcacaatccccgtcccttctcagccccagaactccacacttaggccaggaccagctgctccaatcgcactggtcccagtgttctgcggactgctggttgccaagtctctggtgctgagcgcactcctcgtttggtggggcgatatttggtggaaaacgatgatggaattgagatccctcgatacgcagaaagccacatgccaccttcagcaagtcacagacttgccttggaccagcgtcagctctcccgtggaacgggaaattctgtatcatacagtggcccgcaccaagatttccgacgatgacgacgagcacacactg

SEQ ID NO: 8773 - DNA, 1650 bp, Artificial Sequence
  Synthetic Polynucleotide
atggccttaccagtgaccgccttgctcctgccgctggccttgctgctccacgccgccaggccggacatccagatgacacagagccctagcagcctgtctgccagcgtgggagacagagtgaccatcacatgcaaggccagcgaccacatcaacaactggctggcctggtatcagcagaagcctggacaggcccctaagctgctgatctacggcgctaccacactggaaacaggcgtgcccagcagattttctggcagcggctctggcaccgactacaccctgacaatatccagcctccagcctgaggacttcgccacctactactgtcagcagagctggaacaccccttggacattcggccagggcaccaagctggaaatcaagagaggcggaggcggaagtggaggcggaggatctggcggcggaggctctcaagttcagcttcaacagcctggcgctgagctggtcaaacctggcgcttctgtgaagatgagctgcaaagccagcggctacgccttcagcagctactggatcaactggatgaagcagaaacccggccagggactcgaatggatcggccaaatctatcccggcgacggcgacaccaactacaacggcaagttcaagggcagagccacactgaccgccgatacctctagcagcacagcctacatgcagctgagcagcctgaccagcgaagatagcgccgtgtacttctgtgcccggtccatcacaacagtcgtgggctgcgctatggactattggggccagggaacaagcgtgaccgtgtctagtacgcgtcaacaacagaccctgcctaaaccattcatctgggctgaaccccactttatggttccgaaagagaaacaagtcacgatttgttgccaagggaattacggggccgtcgagtatcagctccactttgagggctccctgtttgctgtggatcggcccaagccacctgaaagaatcaacaaagtccaattctatattcctgatatgaactcccgcatggcaggccagtattcatgtatctaccgcgtgggagaactttggagtgaaccctctaacctgctggacctcgtcgtgacagagatgtatgatacacccacactgtctgtgcaccctgggccagaagttatcagcggagaaaaagttaccttttattgccgcctcgataccgctacctctatgttcctcttgctgaaagagggccgcagctctcacgtgcagcgaggctacggaaaggtccaagctgagtttcctctcggccccgtgaccaccgctcacaggggcacatatagatgttttggctcttataacaatcatgcctggtcattcccatccgagcctgtgaaactgctggtcacaggcgatattgagaatacctctctggccccagaagatcctacattccccgccgacacatggggaacatatctgctgacaaccgaaaccgggctgcaaaaggaccatgctctgtgggatcataccgctcagaatctgcttcggatggggcttgcattcctggtcctggtggctcttgtctggtttctggtcgaggactggctgtcccggaagagaaccagagaaagagcttccagggccagcacctgggaaggcagacgcagactgaatactcagaccctg

SEQ ID NO: 8774 - DNA, 1782 bp, Artificial Sequence
  Synthetic Polynucleotide
atggccttaccagtgaccgccttgctcctgccgctggccttgctgctccacgccgccaggccggacatccagatgacacagagccctagcagcctgtctgccagcgtgggagacagagtgaccatcacatgcaaggccagcgaccacatcaacaactggctggcctggtatcagcagaagcctggacaggcccctaagctgctgatctacggcgctaccacactggaaacaggcgtgcccagcagattttctggcagcggctctggcaccgactacaccctgacaatatccagcctccagcctgaggacttcgccacctactactgtcagcagagctggaacaccccttggacattcggccagggcaccaagctggaaatcaagagaggcggaggcggaagtggaggcggaggatctggcggcggaggctctcaagttcagcttcaacagcctggcgctgagctggtcaaacctggcgcttctgtgaagatgagctgcaaagccagcggctacgccttcagcagctactggatcaactggatgaagcagaaacccggccagggactcgaatggatcggccaaatctatcccggcgacggcgacaccaactacaacggcaagttcaagggcagagccacactgaccgccgatacctctagcagcacagcctacatgcagctgagcagcctgaccagcgaagatagcgccgtgtacttctgtgcccggtccatcacaacagtcgtgggctgcgctatggactattggggccagggaacaagcgtgaccgtgtctagtacgcgtcatgagggagtccacagaaaaccttccctcctggcccacccaggtcgcctggtgaaatcagaagagacagtcatcctgcagtgttggtcagatgtcatgtttgaacacttccttctgcacagagaggggatgtttaacgacactttgcgcctcattggagaacaccatgatggggtctccaaggccaacttctccatcagtcgcatgacgcaagacctggcagggacctacagatgctacggttctgttactcactccccctatcaggtgtcagctcccagtgaccctctggacatcgtgatcataggtctatatgagaaaccttctctctcagcccagctgggccccacggttctggcaggagagaatgtgaccttgtcctgcagctcccggagctcctatgacatgtaccatctatccagggaaggggaggcccatgaacgtaggctccctgcagggcccaaggtcaacggaacattccaggctgactttcctctgggccctgccacccacggagggacctacagatgcttcggctctttccatgactctccatacgagtggtcaaagtcaagtgacccactgcttgtttctgtcacaggaaacccttcaaatagttggccttcacccactgaaccaagctccaaaaccggtaacccccgacacctgcacattctgattgggacctcagtggtcatcatcctcttcatcctcctcttctttctccttcatcgctggtgctccaacaaaaaaaatgctgcggtaatggaccaagagtctgcaggaaacagaacagcgaatagcgaggactctgatgaacaagaccctcaggaggtgacatacacacagttgaatcactgcgttttcacacagagaaaaatcactcgcccttctcagaggcccaagacacccccaacagatatcatcgtgtacacggaacttccaaatgctgagtccagatccaaagttgtctcctgccca

SEQ ID NO: 8775 - DNA, 1782 bp, Artificial Sequence
  Synthetic Polynucleotide
atggccttaccagtgaccgccttgctcctgccgctggccttgctgctccacgccgccaggccggacatccagatgacacagagccctagcagcctgtctgccagcgtgggagacagagtgaccatcacatgcaaggccagcgaccacatcaacaactggctggcctggtatcagcagaagcctggacaggcccctaagctgctgatctacggcgctaccacactggaaacaggcgtgcccagcagattttctggcagcggctctggcaccgactacaccctgacaatatccagcctccagcctgaggacttcgccacctactactgtcagcagagctggaacaccccttggacattcggccagggcaccaagctggaaatcaagagaggcggaggcggaagtggaggcggaggatctggcggcggaggctctcaagttcagcttcaacagcctggcgctgagctggtcaaacctggcgcttctgtgaagatgagctgcaaagccagcggctacgccttcagcagctactggatcaactggatgaagcagaaacccggccagggactcgaatggatcggccaaatctatcccggcgacggcgacaccaactacaacggcaagttcaagggcagagccacactgaccgccgatacctctagcagcacagcctacatgcagctgagcagcctgaccagcgaagatagcgccgtgtacttctgtgcccggtccatcacaacagtcgtgggctgcgctatggactattggggccagggaacaagcgtgaccgtgtctagtacgcgtcatgagggagtccacagaaaaccttccctcctggcccacccaggtcgcctggtgaaatcagaagagacagtcatcctgcaatgttggtcagatgtcaggtttgagcacttccttctgcacagagaagggaagtttaaggacactttgcacctcattggagagcaccatgatggggtctccaaagccaacttctccatcggtcccatgatgcaagaccttgcagggacctacagatgctacggttctgttactcactccccctatcagttgtcagctcccagtgaccctctggacatcgtcatcacaggtctatatgagaaaccttctctctcagcccagccgggccccacggttctggcaggagagagcgtgaccttgtcctgcagctcccggagctcctatgacatgtaccatctatccagggagggggaggcccatgaatgtaggttctctgcagggcccaaggtcaacggaacattccaggccgactttcctctgggccctgccacccacggaggaacctacagatgcttcggctctttccgtgactctccatacgagtggtcaaactcgagtgacccactgcttgtttctgtcacaggaaacccttcaaatagttggccttcacccactgaaccaagctctaaaaccggtaacccccgacacctgcacattctgattgggacctcagtggtcatcatcctcttcatcctcctcttctttctccttcatcgctggtgctccaacaaaaaaaatgctgcggtaatggaccaagagtctgcagggaacagaacagcgaatagcgaggactctgatgaacaagaccctcaggaggtgacatacacacagttgaatcactgcgttttcacacagagaaaaatcactcgcccttctcagaggcccaagacacccccaacagatatcatcgtgtacacggaacttccaaatgctgagtccagatccaaagttgtctcctgccca

SEQ ID NO: 8776 - DNA, 1761 bp, Artificial Sequence
  Synthetic Polynucleotide
atggccttaccagtgaccgccttgctcctgccgctggccttgctgctccacgccgccaggccggacatccagatgacacagagccctagcagcctgtctgccagcgtgggagacagagtgaccatcacatgcaaggccagcgaccacatcaacaactggctggcctggtatcagcagaagcctggacaggcccctaagctgctgatctacggcgctaccacactggaaacaggcgtgcccagcagattttctggcagcggctctggcaccgactacaccctgacaatatccagcctccagcctgaggacttcgccacctactactgtcagcagagctggaacaccccttggacattcggccagggcaccaagctggaaatcaagagaggcggaggcggaagtggaggcggaggatctggcggcggaggctctcaagttcagcttcaacagcctggcgctgagctggtcaaacctggcgcttctgtgaagatgagctgcaaagccagcggctacgccttcagcagctactggatcaactggatgaagcagaaacccggccagggactcgaatggatcggccaaatctatcccggcgacggcgacaccaactacaacggcaagttcaagggcagagccacactgaccgccgatacctctagcagcacagcctacatgcagctgagcagcctgaccagcgaagatagcgccgtgtacttctgtgcccggtccatcacaacagtcgtgggctgcgctatggactattggggccagggaacaagcgtgaccgtgtctagtacgcgtcatgagggagtccacagaaaaccttccctcctggcccacccaggtcccctggtgaaatcagaagagacagtcatcctgcaatgttggtcagatgtcaggtttcagcacttccttctgcacagagaagggaagtttaaggacactttgcacctcattggagagcaccatgatggggtctccaaggccaacttctccatcggtcccatgatgcaagaccttgcagggacctacagatgctacggttctgttactcactccccctatcagttgtcagctcccagtgaccctctggacatcgtcatcacaggtctatatgagaaaccttctctctcagcccagccgggccccacggttctggcaggagagagcgtgaccttgtcctgcagctcccggagctcctatgacatgtaccatctatccagggagggggaggcccatgaacgtaggttctctgcagggcccaaggtcaacggaacattccaggccgactttcctctgggccctgccacccacggaggaacctacagatgcttcggctctttccgtgactctccatacgagtggtcaaactcgagtgacccactgcttgtttctgtcacaggaaacccttcaaatagttggccttcacccactgaaccaagctccgaaaccggtaaccccagacacctgcatgttctgattgggacctcagtggtcatcatcctcttcatcctcctcctcttctttctccttcatcgctggtgctgcaacaaaaaaaatgctgttgtaatggaccaagagcctgcagggaacagaacagtgaacagggaggactctgatgaacaagaccctcaggaggtgacatatgcacagttgaatcactgcgttttcacacagagaaaaatcactcgcccttctcagaggcccaagacacccccaacagatatcatcgtgtacacggaacttccaaatgctgagccc

SEQ ID NO: 8777 - DNA, 1863 bp, Artificial Sequence
  Synthetic Polynucleotide
atggccttaccagtgaccgccttgctcctgccgctggccttgctgctccacgccgccaggccggacatccagatgacacagagccctagcagcctgtctgccagcgtgggagacagagtgaccatcacatgcaaggccagcgaccacatcaacaactggctggcctggtatcagcagaagcctggacaggcccctaagctgctgatctacggcgctaccacactggaaacaggcgtgcccagcagattttctggcagcggctctggcaccgactacaccctgacaatatccagcctccagcctgaggacttcgccacctactactgtcagcagagctggaacaccccttggacattcggccagggcaccaagctggaaatcaagagaggcggaggcggaagtggaggcggaggatctggcggcggaggctctcaagttcagcttcaacagcctggcgctgagctggtcaaacctggcgcttctgtgaagatgagctgcaaagccagcggctacgccttcagcagctactggatcaactggatgaagcagaaacccggccagggactcgaatggatcggccaaatctatcccggcgacggcgacaccaactacaacggcaagttcaagggcagagccacactgaccgccgatacctctagcagcacagcctacatgcagctgagcagcctgaccagcgaagatagcgccgtgtacttctgtgcccggtccatcacaacagtcgtgggctgcgctatggactattggggccagggaacaagcgtgaccgtgtctagtacgcgtcatgagggtggtcaggacaagcccttgctgtctgcctggcccagcgctgtggtgcctcgaggaggacatgtgactcttctgtgtcgctctcgtcttgggtttaccatcttcagtctgtacaaagaagatggggtgcctgtccctgagctctacaacaaaatattctggaagagcatcctcatgggccctgtgacccctgcacacgcagggacctacagatgtcggggttcacacccacgctcccccattgagtggtcagcacccagcaaccccctggtgatcgtggtcacaggtctatttgggaaaccttcactctcagcccagccgggccccacggttcgcacaggagagaacgtgaccttgtcctgcagctccaggagctcatttgacatgtaccatctatccagggaggggagggcccatgaacctaggctccctgcagtgcccagcgtcaatggaacattccaggctgactttcctctgggccctgccacccacggagggacctacacatgcttcggctctctccatgactcaccctatgagtggtcagacccgagtgacccactgcttgtttctgtcacaggaaactcttcaagtagttcatcttcacccactgaaccaagctccaaaactggtatccgcagacacctgcacattctgattgggacctcagtggctatcatcctcttcatcatcctcttcttctttctccttcattgctgctgctccaacaaaaagaatgctgctgtaatggaccaagagcctgccggggacagaacagtgaacagggaggactctgatgatcaagaccctcaggaggtgacatatgcacagttggatcactgcgttttcacacagacaaaaatcacttccccttctcagaggcccaagacacctccaacagataccaccatgtacatggaacttccaaatgctaagccaagatcattgtctcctgcccataagcaccacagtcaggccttgaggggatcttctagggagacaacagccctgtctcaaaaccgggttgctagctcccatgtaccagcagctggaatc

SEQ ID NO: 8778 - DNA, 1863 bp, Artificial Sequence
  Synthetic Polynucleotide
atggccttaccagtgaccgccttgctcctgccgctggccttgctgctccacgccgccaggccggacatccagatgacacagagccctagcagcctgtctgccagcgtgggagacagagtgaccatcacatgcaaggccagcgaccacatcaacaactggctggcctggtatcagcagaagcctggacaggcccctaagctgctgatctacggcgctaccacactggaaacaggcgtgcccagcagattttctggcagcggctctggcaccgactacaccctgacaatatccagcctccagcctgaggacttcgccacctactactgtcagcagagctggaacaccccttggacattcggccagggcaccaagctggaaatcaagagaggcggaggcggaagtggaggcggaggatctggcggcggaggctctcaagttcagcttcaacagcctggcgctgagctggtcaaacctggcgcttctgtgaagatgagctgcaaagccagcggctacgccttcagcagctactggatcaactggatgaagcagaaacccggccagggactcgaatggatcggccaaatctatcccggcgacggcgacaccaactacaacggcaagttcaagggcagagccacactgaccgccgatacctctagcagcacagcctacatgcagctgagcagcctgaccagcgaagatagcgccgtgtacttctgtgcccggtccatcacaacagtcgtgggctgcgctatggactattggggccagggaacaagcgtgaccgtgtctagtacgcgtcatgagggtggacaggacaagcccttgctgtctgcctggcccagcgctgtggtgcctcgaggaggacatgtgactcttctgtgtcgctctcgtcttgggtttaccatcttcagtctgtacaaagaagatggggtgcctgtccctgagctctacaacaaaatattctggaagagcatcctcatgggccctgtgacccctgcacacgcagggacctacagatgtcggggttcacacccgcgctcccccattgagtggtcggcacccagcaaccccctggtgatcgtggtcacaggtctatttgggaaaccttcactctcagcccagccgggccccacggttcgcacaggagagaacgtggccttgtcctgcagctccaggagctcatttgacatgtaccatctatccagggaggggagggcccatgaacctaggctccctgcagtgcccagcgtcgatggaacattccaggctgactttcctctgggccctgccacccacggagggacctacacatgcttcagctctctccatgactcaccctatgagtggtcagacccgagtgacccactgcttgtttctgtcacaggaaactcttcaagtagttcatcttcacccactgaaccaagctccaaaactggtatccgcagacacctgcacattctgattgggacctcagtggctatcatcctcttcatcatcctcttcttctttctccttcattgctgctgctccaacaaaaagaatgctgctgtaatggaccaagggcctgccggggacagaacagtgaacagggaggactctgatgatcaagaccctcaggaggtgacatatgcacagttggatcactgcgttttcacacagacaaaaatcacttccccttctcagaggcccaaggcacctccaacagataccaccatgtacatggaacttccaaatgctaagccaagatcattgtctcctgcccataagcaccacagtcaggccttgaggggatcttctagggagacaacagccctgtctcaaaaccgggttgctagctcccatgtaccagcagctggaatc

SEQ ID NO: 8779 - DNA, 2079 bp, Artificial Sequence
  Synthetic Polynucleotide
atggccttaccagtgaccgccttgctcctgccgctggccttgctgctccacgccgccaggccggacatccagatgacacagagccctagcagcctgtctgccagcgtgggagacagagtgaccatcacatgcaaggccagcgaccacatcaacaactggctggcctggtatcagcagaagcctggacaggcccctaagctgctgatctacggcgctaccacactggaaacaggcgtgcccagcagattttctggcagcggctctggcaccgactacaccctgacaatatccagcctccagcctgaggacttcgccacctactactgtcagcagagctggaacaccccttggacattcggccagggcaccaagctggaaatcaagagaggcggaggcggaagtggaggcggaggatctggcggcggaggctctcaagttcagcttcaacagcctggcgctgagctggtcaaacctggcgcttctgtgaagatgagctgcaaagccagcggctacgccttcagcagctactggatcaactggatgaagcagaaacccggccagggactcgaatggatcggccaaatctatcccggcgacggcgacaccaactacaacggcaagttcaagggcagagccacactgaccgccgatacctctagcagcacagcctacatgcagctgagcagcctgaccagcgaagatagcgccgtgtacttctgtgcccggtccatcacaacagtcgtgggctgcgctatggactattggggccagggaacaagcgtgaccgtgtctagtacgcgtgccggtccacacgtgggtggtcaggacaagcccttcctgtctgcctggcccagcgctgtggtgcctcgaggaggacacgtgactcttcggtgtcactatcgtcataggtttaacaatttcatgctatacaaagaagacagaatccacgttcccatcttccatggcagattattccaggagagcttcaacatgagccctgtgaccacagcacatgcagggaactacacatgtcggggttcacacccacactcccccactgggtggtcggcacccagcaaccccgtggtgatcatggtcacaggaaaccacagaaaaccttccctcctggcccacccaggtcccctggtgaaatcaggagagagagtcatcctgcaatgttggtcagatatcatgtttgagcacttctttctgcacaaagaggggatctctaaggacccctcacgcctcgttggacagatccatgatggggtctccaaggccaatttctccatcggtcccatgatgcttgcccttgcagggacctacagatgctacggttctgttactcacaccccctatcagttgtcagctcccagtgatcccctggacatcgtggtcacaggtccatatgagaaaccttctctctcagcccagccgggccccaaggttcaggcaggagagagcgtgaccttgtcctgcagctcccggagctcctatgacatgtaccatctatccagggaggggggagcccatgaacgtaggctccctgcagtgcgcaaggtcaacagaacattccaggcagatttccctctgggccctgccacccacggagggacctacagatgcttcggctctttccgtcactctccctacgagtggtcagacccgagtgacccactgcttgtttctgtcacaggaaacccttcaagtagttggccttcacccacagaaccaagctccaaatctggtaaccccagacacctgcacattctgattgggacctcagtggtcatcatcctcttcatcctcctcctcttctttctccttcatctctggtgctccaacaaaaaaaatgctgctgtaatggaccaagagcctgcagggaacagaacagccaacagcgaggactctgatgaacaagaccctgaggaggtgacatacgcacagttggatcactgcgttttcacacagagaaaaatcactcgcccttctcagaggcccaagacaccccctacagataccatcttgtacacggaacttccaaatgctaagcccagatccaaagttgtctcctgccca

SEQ ID NO: 8780 - DNA, 2052 bp, Artificial Sequence
  Synthetic Polynucleotide
atggccttaccagtgaccgccttgctcctgccgctggccttgctgctccacgccgccaggccggacatccagatgacacagagccctagcagcctgtctgccagcgtgggagacagagtgaccatcacatgcaaggccagcgaccacatcaacaactggctggcctggtatcagcagaagcctggacaggcccctaagctgctgatctacggcgctaccacactggaaacaggcgtgcccagcagattttctggcagcggctctggcaccgactacaccctgacaatatccagcctccagcctgaggacttcgccacctactactgtcagcagagctggaacaccccttggacattcggccagggcaccaagctggaaatcaagagaggcggaggcggaagtggaggcggaggatctggcggcggaggctctcaagttcagcttcaacagcctggcgctgagctggtcaaacctggcgcttctgtgaagatgagctgcaaagccagcggctacgccttcagcagctactggatcaactggatgaagcagaaacccggccagggactcgaatggatcggccaaatctatcccggcgacggcgacaccaactacaacggcaagttcaagggcagagccacactgaccgccgatacctctagcagcacagcctacatgcagctgagcagcctgaccagcgaagatagcgccgtgtacttctgtgcccggtccatcacaacagtcgtgggctgcgctatggactattggggccagggaacaagcgtgaccgtgtctagtacgcgtctcatgggtggtcaggacaaacccttcctgtctgcccggcccagcactgtggtgcctcgaggaggacacgtggctcttcagtgtcactatcgtcgtgggtttaacaatttcatgctgtacaaagaagacagaagccacgttcccatcttccacggcagaatattccaggagagcttcatcatgggccctgtgaccccagcacatgcagggacctacagatgtcggggttcacgcccacactccctcactgggtggtcggcacccagcaaccccctggtgatcatggtcacaggaaaccacagaaaaccttccctcctggcccacccagggcccctgctgaaatcaggagagacagtcatcctgcaatgttggtcagatgtcatgtttgagcacttctttctgcacagagaggggatctctgaggacccctcacgcctcgttggacagatccatgatggggtctccaaggccaacttctccatcggtcccttgatgcctgtccttgcaggaacctacagatgttatggttctgttcctcactccccctatcagttgtcagctcccagtgaccccctggacatcgtgatcacaggtctatatgagaaaccttctctctcagcccagccgggccccacggttcaggcaggagagaacgtgaccttgtcctgtagctcctggagctcctatgacatctaccatctgtccagggaaggggaggcccatgaacgtaggctccgtgcagtgcccaaggtcaacagaacattccaggcagactttcctctgggccctgccacccacggagggacctacagatgcttcggctctttccgtgccctgccctgcgtgtggtcaaactcaagtgacccactgcttgtttctgtcacaggtatctgcagacacctgcatgttctgattgggacctcagtggtcatcttcctcttcatcctcctcctcttctttctcctttatcgctggtgctccaacaaaaagaatgctgctgtaatggaccaagagcctgcgggggacagaacagtgaataggcaggactctgatgaacaagaccctcaggaggtgacgtacgcacagttggatcactgcgttttcatacagagaaaaatcagtcgcccttctcagaggcccaagacacccctaacagataccagcgtgtacacggaacttccaaatgctgagcccagatccaaagttgtctcctgcccacgagcaccacagtcaggtcttgagggggttttc

SEQ ID NO: 8781 - DNA, 2103 bp, Artificial Sequence
  Synthetic Polynucleotide
atggccttaccagtgaccgccttgctcctgccgctggccttgctgctccacgccgccaggccggacatccagatgacacagagccctagcagcctgtctgccagcgtgggagacagagtgaccatcacatgcaaggccagcgaccacatcaacaactggctggcctggtatcagcagaagcctggacaggcccctaagctgctgatctacggcgctaccacactggaaacaggcgtgcccagcagattttctggcagcggctctggcaccgactacaccctgacaatatccagcctccagcctgaggacttcgccacctactactgtcagcagagctggaacaccccttggacattcggccagggcaccaagctggaaatcaagagaggcggaggcggaagtggaggcggaggatctggcggcggaggctctcaagttcagcttcaacagcctggcgctgagctggtcaaacctggcgcttctgtgaagatgagctgcaaagccagcggctacgccttcagcagctactggatcaactggatgaagcagaaacccggccagggactcgaatggatcggccaaatctatcccggcgacggcgacaccaactacaacggcaagttcaagggcagagccacactgaccgccgatacctctagcagcacagcctacatgcagctgagcagcctgaccagcgaagatagcgccgtgtacttctgtgcccggtccatcacaacagtcgtgggctgcgctatggactattggggccagggaacaagcgtgaccgtgtctagtacgcgtctcatgggtggtcaggacaaacccttcctgtctgcccggcccagcactgtggtgcctcgaggaggacacgtggctcttcagtgtcactatcgtcgtgggtttaacaatttcatgctgtacaaagaagacagaagccacgttcccatcttccacggcagaatattccaggagagcttcatcatgggccctgtgaccccagcacatgcagggacctacagatgtcggggttcacgcccacactccctcactgggtggtcggcacccagcaaccccctggtgatcatggtcacaggaaaccacagaaaaccttccctcctggcccacccagggcccctgctgaaatcaggagagacagtcatcctgcaatgttggtcagatgtcatgtttgagcacttctttctgcacagagaggggatctctgaggacccctcacgcctcgttggacagatccatgatggggtctccaaggccaacttctccatcggtcccttgatgcctgtccttgcaggaacctacagatgttatggttctgttcctcactccccctatcagttgtcagctcccagtgaccccctggacatcgtgatcacaggtctatatgagaaaccttctctctcagcccagccgggccccacggttcaggcaggagagaacgtgaccttgtcctgtagctcctggagctcctatgacatctaccatctgtccagggaaggggaggcccatgaacgtaggctccgtgcagtgcccaaggtcaacagaacattccaggcagactttcctctgggccctgccacccacggagggacctacagatgcttcggctctttccgtgccctgccctgcgtgtggtcaaactcaagtgacccactgcttgtttctgtcacaggaaacccttcaagtagttggccttcacccacagaaccaagctccaaatctggtatctgcagacacctgcatgttctgattgggacctcagtggtcatcttcctcttcatcctcctcctcttctttctcctttatcgctggtgctccaacaaaaagaatgctgctgtaatggaccaagagcctgcgggggacagaacagtgaataggcaggactctgatgaacaagaccctcaggaggtgacgtacgcacagttggatcactgcgttttcatacagagaaaaatcagtcgcccttctcagaggcccaagacacccctaacagataccagcgtgtacacggaacttccaaatgctgagcccagatccaaagttgtctcctgcccacgagcaccacagtcaggtcttgagggggttttc

SEQ ID NO: 8782 - DNA, 1956 bp, Artificial Sequence
  Synthetic Polynucleotide
atggccttaccagtgaccgccttgctcctgccgctggccttgctgctccacgccgccaggccggacatccagatgacacagagccctagcagcctgtctgccagcgtgggagacagagtgaccatcacatgcaaggccagcgaccacatcaacaactggctggcctggtatcagcagaagcctggacaggcccctaagctgctgatctacggcgctaccacactggaaacaggcgtgcccagcagattttctggcagcggctctggcaccgactacaccctgacaatatccagcctccagcctgaggacttcgccacctactactgtcagcagagctggaacaccccttggacattcggccagggcaccaagctggaaatcaagagaggcggaggcggaagtggaggcggaggatctggcggcggaggctctcaagttcagcttcaacagcctggcgctgagctggtcaaacctggcgcttctgtgaagatgagctgcaaagccagcggctacgccttcagcagctactggatcaactggatgaagcagaaacccggccagggactcgaatggatcggccaaatctatcccggcgacggcgacaccaactacaacggcaagttcaagggcagagccacactgaccgccgatacctctagcagcacagcctacatgcagctgagcagcctgaccagcgaagatagcgccgtgtacttctgtgcccggtccatcacaacagtcgtgggctgcgctatggactattggggccagggaacaagcgtgaccgtgtctagtacgcgtcaggacaagcccttcctctctgcctggcccggcactgtggtgtctgaaggacaacatgtgactcttcagtgtcgctctcgtcttgggtttaatgaattcagtctgtccaaagaagacgggatgcctgtccctgagctctacaacagaatattccggaacagctttctcatgggccctgtgaccccagcacatgcagggacctacagatgttgcagttcacacccacactcccccactgggtggtcggcacccagcaaccctgtggtgatcatggtcacaggagtccacagaaaaccttccctcctggcccacccaggtcccctggtgaaatcaggagagacggtcatcctgcaatgttggtcagatgtcaggtttgagcgcttccttctgcacagagaggggatcactgaggaccccttgcgcctcgttggacagctccacgatgcgggttcccaggtcaactattccatgggtcccatgacacctgcccttgcagggacctacagatgctttggttctgtcactcacttaccctatgagttgtcggctcccagtgaccctctggacatcgtggtcgtaggtctatatgggaaaccttctctctcagcccagccgggccccacggttcaggcaggagagaatgtgaccttgtcctgcagctcccggagcttgtttgacatttaccatctatccagggaggcggaggccggtgaacttaggctcactgcagtgctgagggtcaatggaacattccaggccaacttccctctgggccctgtgacccacggagggaactacagatgcttcggctctttccgtgccctgccccatgcgtggtcagacccgagtgacccactgcccgtttctgtcacaggtaactccagaaacctgcacgttctgattgggacctcagtggtcatcatcccctttgctatcctcctcttctttctccttcatcgctggtgtgccaacaaaaagaatgctgttgtaatggaccaagagcctgcagggaacagaacagtgaacagggaggactctgatgaacaagaccctcaggaggtgacatacgcacagttgaatcactgcgttttcacacagagaaaaatcactcgcccttctcagaggcccaagacacccccaacagataccagcgtg

SEQ ID NO: 8783 - DNA, 1869 bp, Artificial Sequence
  Synthetic Polynucleotide
atggccttaccagtgaccgccttgctcctgccgctggccttgctgctccacgccgccaggccggacatccagatgacacagagccctagcagcctgtctgccagcgtgggagacagagtgaccatcacatgcaaggccagcgaccacatcaacaactggctggcctggtatcagcagaagcctggacaggcccctaagctgctgatctacggcgctaccacactggaaacaggcgtgcccagcagattttctggcagcggctctggcaccgactacaccctgacaatatccagcctccagcctgaggacttcgccacctactactgtcagcagagctggaacaccccttggacattcggccagggcaccaagctggaaatcaagagaggcggaggcggaagtggaggcggaggatctggcggcggaggctctcaagttcagcttcaacagcctggcgctgagctggtcaaacctggcgcttctgtgaagatgagctgcaaagccagcggctacgccttcagcagctactggatcaactggatgaagcagaaacccggccagggactcgaatggatcggccaaatctatcccggcgacggcgacaccaactacaacggcaagttcaagggcagagccacactgaccgccgatacctctagcagcacagcctacatgcagctgagcagcctgaccagcgaagatagcgccgtgtacttctgtgcccggtccatcacaacagtcgtgggctgcgctatggactattggggccagggaacaagcgtgaccgtgtctagtacgcgttgggcacacgtgggtggtcaggacaagcccttctgctctgcctggcccagcgctgtggtgcctcaaggaggacacgtgactcttcggtgtcactatcgtcgtgggtttaacatcttcacgctgtacaagaaagatggggtccctgtccctgagctctacaacagaatattctggaacagtttcctcattagccctgtgaccccagcacacgcagggacctacagatgtcgaggttttcacccgcactcccccactgagtggtcggcacccagcaaccccctggtgatcatggtcacaggtctatatgagaaaccttcgcttacagcccggccgggccccacggttcgcgcaggagagaacgtgaccttgtcctgcagctcccagagctcctttgacatctaccatctatccagggagggggaagcccatgaacttaggctccctgcagtgcccagcatcaatggaacattccaggccgacttccctctgggtcctgccacccacggagagacctacagatgcttcggctctttccatggatctccctacgagtggtcagacccgagtgacccactgcctgtttctgtcacaggaaacccttctagtagttggccttcacccactgaaccaagcttcaaaactggtatcgccagacacctgcatgctgtgattaggtactcagtggccatcatcctctttaccatccttcccttctttctccttcatcgctggtgctccaaaaaaaaaaatgctgctgtaatgaaccaagagcctgcgggacacagaacagtgaacagggaggactctgatgaacaagaccctcaggaggtgacatacgcacagttggatcactgcattttcacacagagaaaaatcactggcccttctcagaggagcaagagaccctcaacagataccagcgtgtgtatagaacttccaaatgctgagcccagagcgttgtctcctgcccatgagcaccacagtcaggccttgatgggatcttctagggagacaacagccctgtctcaaacccagcttgccagctctaatgtaccagcagctggaatc

SEQ ID NO: 8784 - DNA, 1557 bp, Artificial Sequence
  Synthetic Polynucleotide
atggccttaccagtgaccgccttgctcctgccgctggccttgctgctccacgccgccaggccggacatccagatgacacagagccctagcagcctgtctgccagcgtgggagacagagtgaccatcacatgcaaggccagcgaccacatcaacaactggctggcctggtatcagcagaagcctggacaggcccctaagctgctgatctacggcgctaccacactggaaacaggcgtgcccagcagattttctggcagcggctctggcaccgactacaccctgacaatatccagcctccagcctgaggacttcgccacctactactgtcagcagagctggaacaccccttggacattcggccagggcaccaagctggaaatcaagagaggcggaggcggaagtggaggcggaggatctggcggcggaggctctcaagttcagcttcaacagcctggcgctgagctggtcaaacctggcgcttctgtgaagatgagctgcaaagccagcggctacgccttcagcagctactggatcaactggatgaagcagaaacccggccagggactcgaatggatcggccaaatctatcccggcgacggcgacaccaactacaacggcaagttcaagggcagagccacactgaccgccgatacctctagcagcacagcctacatgcagctgagcagcctgaccagcgaagatagcgccgtgtacttctgtgcccggtccatcacaacagtcgtgggctgcgctatggactattggggccagggaacaagcgtgaccgtgtctagtacgcgttgggcacacgtgggtggtcaggacaagcccttctgctctgcctggcccagcgctgtggtgcctcaaggaggacacgtgactcttcggtgtcactatcgtcgtgggtttaacatcttcacgctgtacaagaaagatggggtccctgtccctgagctctacaacagaatattctggaacagtttcctcattagccctgtgaccccagcacacgcagggacctacagatgtcgaggttttcacccgcactcccccactgagtggtcggcacccagcaaccccctggtgatcatggtcacaggtctatatgagaaaccttcgcttacagcccggccgggccccacggttcgcgcaggagagaacgtgaccttgtcctgcagctcccagagctcctttgacatctaccatctatccagggagggggaagcccatgaacttaggctccctgcagtgcccagcatcaatggaacattccaggccgacttccctctgggtcctgccacccacggagagacctacagatgcttcggctctttccatggatctccctacgagtggtcagacccgagtgacccactgcctgtttctgtcacaggaaacccttctagtagttggccttcacccactgaaccaagcttcaaaactggtatcgccagacacctgcatgctgtgattaggtactcagtggccatcatcctctttaccatccttcccttctttctccttcatcgctggtgctccaaaaaaaaaatgctgctg

SEQ ID NO: 8785 - DNA, 1653 bp, Artificial Sequence
  Synthetic Polynucleotide
atggccttaccagtgaccgccttgctcctgccgctggccttgctgctccacgccgccaggccggacatccagatgacacagagccctagcagcctgtctgccagcgtgggagacagagtgaccatcacatgcaaggccagcgaccacatcaacaactggctggcctggtatcagcagaagcctggacaggcccctaagctgctgatctacggcgctaccacactggaaacaggcgtgcccagcagattttctggcagcggctctggcaccgactacaccctgacaatatccagcctccagcctgaggacttcgccacctactactgtcagcagagctggaacaccccttggacattcggccagggcaccaagctggaaatcaagagaggcggaggcggaagtggaggcggaggatctggcggcggaggctctcaagttcagcttcaacagcctggcgctgagctggtcaaacctggcgcttctgtgaagatgagctgcaaagccagcggctacgccttcagcagctactggatcaactggatgaagcagaaacccggccagggactcgaatggatcggccaaatctatcccggcgacggcgacaccaactacaacggcaagttcaagggcagagccacactgaccgccgatacctctagcagcacagcctacatgcagctgagcagcctgaccagcgaagatagcgccgtgtacttctgtgcccggtccatcacaacagtcgtgggctgcgctatggactattggggccagggaacaagcgtgaccgtgtctagtacgcgtcatgagggagtccacagaaaaccttccctcctggcccacccaggtcgcctggtgaaatcagaagagacagtcatcctgcaatgttggtcagatgtcatgtttgaacacttccttctgcacagagaggggatgtttaacgacactttgcgcctcattggagaacaccatgatggggtctccaaggccaacttctccatcagtcgcatgaagcaagacctggcagggacctacagatgctacggttctgttactcactccccctatcagttgtcagctcccagtgaccctctggacatcgtgatcataggtctatatgagaaaccttctctctcagcccagccgggccccacggttctggcaggagagaatgtgaccttgtcctgcagctcccggagctcctatgacatgtaccatctatccagggaaggggaggcccatgaacgtaggctccctgcagggaccaaggtcaacggaacattccaggccaactttcctctgggccctgccacccatggagggacctacagatgcttcggctctttccgtgactctccatacgagtggtcaaagtcaagtgacccactgcttgtttctgtcacaggaaacccttcaaatagttggccttcacccactgaaccaagctccgaaaccggtaaccccagacacctacatgttctgattgggacctcagtggtcaaaatccctttcaccatcctcctcttctttctccttcatcgctggtgctccgacaaaaaaaatgctgctgtaatggaccaagagcctgcagggaacagaacagtgaacagcgaggattctgatgaacaagaccatcaggaggtgtcatacgcataa

SEQ ID NO: 8786 - DNA, 1650 bp, Artificial Sequence
  Synthetic Polynucleotide
atggccttaccagtgaccgccttgctcctgccgctggccttgctgctccacgccgccaggccggacatccagatgacacagagccctagcagcctgtctgccagcgtgggagacagagtgaccatcacatgcaaggccagcgaccacatcaacaactggctggcctggtatcagcagaagcctggacaggcccctaagctgctgatctacggcgctaccacactggaaacaggcgtgcccagcagattttctggcagcggctctggcaccgactacaccctgacaatatccagcctccagcctgaggacttcgccacctactactgtcagcagagctggaacaccccttggacattcggccagggcaccaagctggaaatcaagagaggcggaggcggaagtggaggcggaggatctggcggcggaggctctcaagttcagcttcaacagcctggcgctgagctggtcaaacctggcgcttctgtgaagatgagctgcaaagccagcggctacgccttcagcagctactggatcaactggatgaagcagaaacccggccagggactcgaatggatcggccaaatctatcccggcgacggcgacaccaactacaacggcaagttcaagggcagagccacactgaccgccgatacctctagcagcacagcctacatgcagctgagcagcctgaccagcgaagatagcgccgtgtacttctgtgcccggtccatcacaacagtcgtgggctgcgctatggactattggggccagggaacaagcgtgaccgtgtctagtacgcgtcatgagggagtccacagaaaaccttccctcctggcccacccaggtcccctggtgaaatcagaagagacagtcatcctgcaatgttggtcagatgtcaggtttgagcacttccttctgcacagagaggggaagtataaggacactttgcacctcattggagagcaccatgatggggtctccaaggccaacttctccatcggtcccatgatgcaagaccttgcagggacctacagatgctacggttctgttactcactccccctatcagttgtcagctcccagtgaccctctggacatcgtcatcacaggtctatatgagaaaccttctctctcagcccagccgggccccacggttttggcaggagagagcgtgaccttgtcctgcagctcccggagctcctatgacatgtaccatctatccagggagggggaggcccatgaacgtaggttctctgcagggcccaaggtcaacggaacattccaggccgactttcctctgggccctgccacccacggaggaacctacagatgcttcggctctttccgtgactctccctatgagtggtcaaactcgagtgacccactgcttgtttctgtcacaggaaacccttcaaatagttggccttcacccactgaaccaagctccaaaaccggtaaccccagacacctgcatgttctgattgggacctcagtggtcaaaatccctttcaccatcctcctcttctttctccttcatcgctggtgctccaacaaaaaaaatgctgctgtaatggaccaagagcctgcagggaacagaacagtgaacagcgaggattctgatgaacaagaccatcaggaggtgtcatacgca

SEQ ID NO: 8787 - DNA, 1650 bp, Artificial Sequence
  Synthetic Polynucleotide
atggccttaccagtgaccgccttgctcctgccgctggccttgctgctccacgccgccaggccggacatccagatgacacagagccctagcagcctgtctgccagcgtgggagacagagtgaccatcacatgcaaggccagcgaccacatcaacaactggctggcctggtatcagcagaagcctggacaggcccctaagctgctgatctacggcgctaccacactggaaacaggcgtgcccagcagattttctggcagcggctctggcaccgactacaccctgacaatatccagcctccagcctgaggacttcgccacctactactgtcagcagagctggaacaccccttggacattcggccagggcaccaagctggaaatcaagagaggcggaggcggaagtggaggcggaggatctggcggcggaggctctcaagttcagcttcaacagcctggcgctgagctggtcaaacctggcgcttctgtgaagatgagctgcaaagccagcggctacgccttcagcagctactggatcaactggatgaagcagaaacccggccagggactcgaatggatcggccaaatctatcccggcgacggcgacaccaactacaacggcaagttcaagggcagagccacactgaccgccgatacctctagcagcacagcctacatgcagctgagcagcctgaccagcgaagatagcgccgtgtacttctgtgcccggtccatcacaacagtcgtgggctgcgctatggactattggggccagggaacaagcgtgaccgtgtctagtacgcgtcatgagggattccgcagaaaaccttccctcctggcccacccaggtcgcctggtgaaatcagaagagacagtcatcctgcaatgttggtcagatgtcatgtttgagcacttccttctgcacagagaggggacgtttaacgacactttgcgcctcattggagagcacattgatggggtctccaaggccaacttctccatcggtcgcatgaggcaagacctggcagggacctacagatgctacggttctgttcctcactccccctatcagttttcagctcccagtgaccctctggacatcgtgatcacaggtctatatgagaaaccttctctctcagcccagccgggccccacggttctggcaggagagagcgtgaccttgtcctgcagctcctggagctcctatgacatgtaccatctatccacggagggggaggcccatgaacgtaggttctctgcagggcccaaggtcaacggaacattccaggccgactttcctctgggccctgccacccaaggaggaacctacagatgcttcggctctttccatgactctccctacgagtggtcaaagtcaagtgacccactgcttgtttctgtcacaggaaacccttcaaatagttggccttcacccactgaaccaagctccaaaaccggtaaccccagacacctacacgttctgattgggacctcagtggtcaaactccctttcaccatcctcctcttctttctccttcatcgctggtgctccgacaaaaaaaatgcatctgtaatggaccaagggcctgcggggaacagaacagtgaacagggaggattctgacgaacaggaccatcaggaggtgtcatacgca

SEQ ID NO: 8788 - DNA, 1650 bp, Artificial Sequence
  Synthetic Polynucleotide
atggccttaccagtgaccgccttgctcctgccgctggccttgctgctccacgccgccaggccggacatccagatgacacagagccctagcagcctgtctgccagcgtgggagacagagtgaccatcacatgcaaggccagcgaccacatcaacaactggctggcctggtatcagcagaagcctggacaggcccctaagctgctgatctacggcgctaccacactggaaacaggcgtgcccagcagattttctggcagcggctctggcaccgactacaccctgacaatatccagcctccagcctgaggacttcgccacctactactgtcagcagagctggaacaccccttggacattcggccagggcaccaagctggaaatcaagagaggcggaggcggaagtggaggcggaggatctggcggcggaggctctcaagttcagcttcaacagcctggcgctgagctggtcaaacctggcgcttctgtgaagatgagctgcaaagccagcggctacgccttcagcagctactggatcaactggatgaagcagaaacccggccagggactcgaatggatcggccaaatctatcccggcgacggcgacaccaactacaacggcaagttcaagggcagagccacactgaccgccgatacctctagcagcacagcctacatgcagctgagcagcctgaccagcgaagatagcgccgtgtacttctgtgcccggtccatcacaacagtcgtgggctgcgctatggactattggggccagggaacaagcgtgaccgtgtctagtacgcgtcaagagggcgtgcacagaaagcccagctttctggctctgcctggacacctggtcaagagcgaagagacagtgatcctccagtgttggagcgacgtgatgttcgagcactttctgctgcacagagagggcaagttcaacaacaccctgcacctgatcggcgagcaccatgatggcgtgtccaaggccaatttcagcatcggccccatgatgcctgtgctggccggcacctatagatgctacggatctgtgcctcacagcccctaccagctgtctgccccttctgaccctctggacatggttatcatcggcctgtacgagaagcccagcctgtctgctcaacctggacctacagttcaggccggcgagaacgtgacactgagctgtagcagcagatccagctacgacatgtaccacctgagcagagaaggcgaggcccacgaacgtagacttccagccgtgcggagcatcaacggcaccttccaggccgattttccactgggacctgccacacacggcggcacatacagatgcttcggcagcttcagagatgccccttacgagtggtccaacagcagcgatcctctgctggtgtccgtgaccggcaatcccagcaatagctggccctctccaacagagcccagcagcaagacaggcaaccccagacatctgcacgtgctgatcggaaccagcgtggtcaagatcccctttacaatcctgctgttctttctgctccatcggtggtgcagcgacaagaaaaacgccgccgtgatggaccaagagcctgccggcaatagaaccgtgaacagcgaggatagcgacgagcaggaccaccaagaggtgtcctatgct

SEQ ID NO: 8789 - DNA, 1653 bp, Artificial Sequence
  Synthetic Polynucleotide
atggccttaccagtgaccgccttgctcctgccgctggccttgctgctccacgccgccaggccggacatccagatgacacagagccctagcagcctgtctgccagcgtgggagacagagtgaccatcacatgcaaggccagcgaccacatcaacaactggctggcctggtatcagcagaagcctggacaggcccctaagctgctgatctacggcgctaccacactggaaacaggcgtgcccagcagattttctggcagcggctctggcaccgactacaccctgacaatatccagcctccagcctgaggacttcgccacctactactgtcagcagagctggaacaccccttggacattcggccagggcaccaagctggaaatcaagagaggcggaggcggaagtggaggcggaggatctggcggcggaggctctcaagttcagcttcaacagcctggcgctgagctggtcaaacctggcgcttctgtgaagatgagctgcaaagccagcggctacgccttcagcagctactggatcaactggatgaagcagaaacccggccagggactcgaatggatcggccaaatctatcccggcgacggcgacaccaactacaacggcaagttcaagggcagagccacactgaccgccgatacctctagcagcacagcctacatgcagctgagcagcctgaccagcgaagatagcgccgtgtacttctgtgcccggtccatcacaacagtcgtgggctgcgctatggactattggggccagggaacaagcgtgaccgtgtctagtacgcgtcatgagggattccgcagaaaaccttccctcctggcccacccaggtcccctggtgaaatcagaagagacagtcatcctgcaatgttggtcagatgtcatgtttgagcacttccttctgcacagagaggggacgtttaaccacactttgcgcctcattggagagcacattgatggggtctccaagggcaacttctccatcggtcgcatgacacaagacctggcagggacctacagatgctacggttctgttactcactccccctatcagttgtcagcgcccagtgaccctctggacatcgtgatcacaggtctatatgagaaaccttctctctcagcccagccgggccccacggttctggcaggagagagcgtgaccttgtcctgcagctcccggagctcctatgacatgtaccatctatccagggaaggggaggcccatgaacgtaggctccctgcagggcccaaggtcaacagaacattccaggccgactttcctctggaccctgccacccacggagggacctacagatgcttcggctctttccgtgactctccatacgagtggtcaaagtcaagtgacccactgcttgtttctgtcacaggaaactcttcaaatagttggccttcacccactgaaccaagctccgaaaccggtaaccccagacacctacacgttctgattgggacctcagtggtcaaactccctttcaccatcctcctcttctttctccttcatcgctggtgctccaacaaaaaaaatgcatctgtaatggaccaagggcctgcggggaacagaacagtgaacagggaggattctgatgaacaggaccatcaggaggtgtcatacgcataa

SEQ ID NO: 8790 - DNA, 1893 bp, Artificial Sequence
  Synthetic Polynucleotide
atggccttaccagtgaccgccttgctcctgccgctggccttgctgctccacgccgccaggccggacatccagatgacacagagccctagcagcctgtctgccagcgtgggagacagagtgaccatcacatgcaaggccagcgaccacatcaacaactggctggcctggtatcagcagaagcctggacaggcccctaagctgctgatctacggcgctaccacactggaaacaggcgtgcccagcagattttctggcagcggctctggcaccgactacaccctgacaatatccagcctccagcctgaggacttcgccacctactactgtcagcagagctggaacaccccttggacattcggccagggcaccaagctggaaatcaagagaggcggaggcggaagtggaggcggaggatctggcggcggaggctctcaagttcagcttcaacagcctggcgctgagctggtcaaacctggcgcttctgtgaagatgagctgcaaagccagcggctacgccttcagcagctactggatcaactggatgaagcagaaacccggccagggactcgaatggatcggccaaatctatcccggcgacggcgacaccaactacaacggcaagttcaagggcagagccacactgaccgccgatacctctagcagcacagcctacatgcagctgagcagcctgaccagcgaagatagcgccgtgtacttctgtgcccggtccatcacaacagtcgtgggctgcgctatggactattggggccagggaacaagcgtgaccgtgtctagtacgcgtgccggtccacacatgggtggtcaggacaagcccttcctgtctgcctggcccagcgctgtggtgcctcgcggaggacacgtgactcttcggtgtcactatcgtcataggtttaacaatttcatgctatacaaagaagacagaatccacgttcccatcttccatggcagaatattccaggagggcttcaacatgagccctgtgaccacagcacatgcagggaactacacatgtcggggttcacacccacactcccccactgggtggtcggcacccagcaaccccatggtgatcatggtcacaggaaaccacagaaaaccttccctcctggcccacccaggtcccctggtgaaatcaggagagagagtcatcctgcaatgttggtcagatatcatgtttgagcacttctttctgcacaaagagtggatctctaaggacccctcacgcctcgttggacagatccatgatggggtctccaaggccaatttctccatcggttccatgatgcgtgcccttgcagggacctacagatgctacggttctgttactcacaccccctatcagttgtcagctcccagtgatcccctggacatcgtggtcacaggtctatatgagaaaccttctctctcagcccagccgggccccaaggttcaggcaggagagagcgtgaccttgtcctgtagctcccggagctcctatgacatgtaccatctatccagggaggggggagcccatgaacgtaggctccctgcagtgcgcaaggtcaacagaacattccaggcagatttccctctgggccctgccacccacggagggacctacagatgcttcggctctttccgtcactctccctacgagtggtcagacccgagtgacccactgcttgtttctgtcacaggaaacccttcaagtagttggccttcacccacagaaccaagctccaaatctggtaacctcagacacctgcacattctgattgggacctcagtggtcaaaatccctttcaccatcctcctcttctttctccttcatcgctggtgctccaacaaaaaaaaatgctgctgtaatggaccaagagcctgcagggaacagaag

SEQ ID NO: 8791 - DNA, 1932 bp, Artificial Sequence
  Synthetic Polynucleotide
atggccttaccagtgaccgccttgctcctgccgctggccttgctgctccacgccgccaggccggacatccagatgacacagagccctagcagcctgtctgccagcgtgggagacagagtgaccatcacatgcaaggccagcgaccacatcaacaactggctggcctggtatcagcagaagcctggacaggcccctaagctgctgatctacggcgctaccacactggaaacaggcgtgcccagcagattttctggcagcggctctggcaccgactacaccctgacaatatccagcctccagcctgaggacttcgccacctactactgtcagcagagctggaacaccccttggacattcggccagggcaccaagctggaaatcaagagaggcggaggcggaagtggaggcggaggatctggcggcggaggctctcaagttcagcttcaacagcctggcgctgagctggtcaaacctggcgcttctgtgaagatgagctgcaaagccagcggctacgccttcagcagctactggatcaactggatgaagcagaaacccggccagggactcgaatggatcggccaaatctatcccggcgacggcgacaccaactacaacggcaagttcaagggcagagccacactgaccgccgatacctctagcagcacagcctacatgcagctgagcagcctgaccagcgaagatagcgccgtgtacttctgtgcccggtccatcacaacagtcgtgggctgcgctatggactattggggccagggaacaagcgtgaccgtgtctagtacgcgttctctgactaaccacacagaaaccatcaccgtggaggaaggccagacgctcactctaaagtgtgtcacttctctgaggaagaactcctccctccagtggctgaccccctcagggttcaccatttttttaaatgagtatcctgctttaaaaaattccaaataccagcttcttcatcactcggccaatcagctctccatcactgtgcctaacgtaaccctgcaagatgaaggcgtgtacaagtgcttacattacagcgactctgtaagcacaaaggaagtgaaagtgattgtgctggcaactcctttcaagccaatcctggaagcttcagttatcagaaagcaaaatggagaagaacatgttgtactcatgtgctccaccatgagaagcaagccccctccgcagataacctggctacttgggaatagcatggaagtgtccggtggaacgctccatgaatttgaaactgatgggaagaaatgtaatactaccagcactctcataatccacacttatggcaaaaattcaacggtggactgcattatccgacacagaggcctgcaagggagaaaactagtagcacccttccggtttgaagatttggttactgatgaagagacagcttcagatgctctggagagaaactctctatcctctcaagacccacagcagcccaccagtactgtctcagtaacggaagattctagtacatcggagattgacaaggaagagaaagaacaaaccactcaagatcctgacttgaccaccgaagcaaatcctcagtatttaggactggcaagaaagaaaagtggcatcctgctgctcacgctggtgtccttcctcattttcatactcttcatcatagtccagctcttcatcatgaagctgaggaaagcacatgtgatatggaagaaagaaaacgaagtttcagaacacacactagaaagttacagatcaaggtcaaataatgaagaaacatcatctgaagagaaaaatggccaatcttcccaccctatgcgttgcatgaactacatcacaaagttgtactcagaagcaaaaacaaagaggaaggaaaatgtacaacattcaaaattagaagaaaagcacatccaagtaccagagagtattgtgtag

SEQ ID NO: 8792 - DNA, 1470 bp, Artificial Sequence
  Synthetic Polynucleotide
atggccttaccagtgaccgccttgctcctgccgctggccttgctgctccacgccgccaggccggacatccagatgacacagagccctagcagcctgtctgccagcgtgggagacagagtgaccatcacatgcaaggccagcgaccacatcaacaactggctggcctggtatcagcagaagcctggacaggcccctaagctgctgatctacggcgctaccacactggaaacaggcgtgcccagcagattttctggcagcggctctggcaccgactacaccctgacaatatccagcctccagcctgaggacttcgccacctactactgtcagcagagctggaacaccccttggacattcggccagggcaccaagctggaaatcaagagaggcggaggcggaagtggaggcggaggatctggcggcggaggctctcaagttcagcttcaacagcctggcgctgagctggtcaaacctggcgcttctgtgaagatgagctgcaaagccagcggctacgccttcagcagctactggatcaactggatgaagcagaaacccggccagggactcgaatggatcggccaaatctatcccggcgacggcgacaccaactacaacggcaagttcaagggcagagccacactgaccgccgatacctctagcagcacagcctacatgcagctgagcagcctgaccagcgaagatagcgccgtgtacttctgtgcccggtccatcacaacagtcgtgggctgcgctatggactattggggccagggaacaagcgtgaccgtgtctagtacgcgtatgatgacaggcacaatagaaacaacggggaacatttctgcagagaaaggtggctctatcatcttacaatgtcacctctcctccaccacggcacaagtgacccaggtcaactgggagcagcaggaccagcttctggccatttgtaatgctgacttggggtggcacatctccccatccttcaaggatcgagtggccccaggtcccggcctgggcctcaccctccagtcgctgaccgtgaacgatacaggggagtacttctgcatctatcacacctaccctgatgggacgtacactgggagaatcttcctggaggtcctagaaagctcagtggctgagcacggtgccaggttccagattccattgcttggagccatggccgcgacgctggtggtcatctgcacagcagtcatcgtggtggtcgcgttgactagaaagaagaaagccctcagaatccattctgtggaaggtgacctcaggagaaaatcagctggacaggaggaatggagccccagtgctccctcacccccaggaagctgtgtccaggcagaagctgcacctgctgggctctgtggagagcagcggggagaggactgtgccgagctgcatgactacttcaatgtcctgagttacagaagcctgggtaactgcagcttcttcacagagactggt

SEQ ID NO: 8793 - DNA, 1734 bp, Artificial Sequence
  Synthetic Polynucleotide
atggccttaccagtgaccgccttgctcctgccgctggccttgctgctccacgccgccaggccggacatccagatgacacagagccctagcagcctgtctgccagcgtgggagacagagtgaccatcacatgcaaggccagcgaccacatcaacaactggctggcctggtatcagcagaagcctggacaggcccctaagctgctgatctacggcgctaccacactggaaacaggcgtgcccagcagattttctggcagcggctctggcaccgactacaccctgacaatatccagcctccagcctgaggacttcgccacctactactgtcagcagagctggaacaccccttggacattcggccagggcaccaagctggaaatcaagagaggcggaggcggaagtggaggcggaggatctggcggcggaggctctcaagttcagcttcaacagcctggcgctgagctggtcaaacctggcgcttctgtgaagatgagctgcaaagccagcggctacgccttcagcagctactggatcaactggatgaagcagaaacccggccagggactcgaatggatcggccaaatctatcccggcgacggcgacaccaactacaacggcaagttcaagggcagagccacactgaccgccgatacctctagcagcacagcctacatgcagctgagcagcctgaccagcgaagatagcgccgtgtacttctgtgcccggtccatcacaacagtcgtgggctgcgctatggactattggggccagggaacaagcgtgaccgtgtctagtacgcgtcaaagcagcttaaccccattgatggtgaacgggattctgggggagtcagtaactcttcccctggagtttcctgcaggagagaaggtcaacttcatcacttggcttttcaatgaaacatctcttgccttcatagtaccccatgaaaccaaaagtccagaaatccacgtgactaatccgaaacagggaaagcgactgaacttcacccagtcctactccctgcaactcagcaacctgaagatggaagacacaggctcttacagagcccagatatccacaaagacctctgcaaagctgtccagttacactctgaggatattaagacaactgaggaacatacaagttaccaatcacagtcagctatttcagaatatgacctgtgagctccatctgacttgctctgtggaggatgcagatgacaatgtctcattcagatgggaggccttgggaaacacactttcaagtcagccaaacctcactgtctcctgggaccccaggatttccagtgaacaggactacacctgcatagcagagaatgctgtcagtaatttatccttctctgtctctgcccagaagctttgcgaagatgttaaaattcaatatacagataccaaaatgattctgtttatggtttctgggatatgcatagtcttcggtttcatcatactgctgttacttgttttgaggaaaagaagagattccctatctttgtctactcagcgaacacagggccccgcagagtccgcaaggaacctagagtatgtttcagtgtctccaacgaacaacactgtgtatgcttcagtcactcattcaaacagggaaacagaaatctggacacctagagaaaatgatactatcacaatttactccacaattaatcattccaaagagagtaaacccactttttccagggcaactgcccttgacaatgtcgtg

SEQ ID NO: 8794 - DNA, 1740 bp, Artificial Sequence
  Synthetic Polynucleotide
atggccttaccagtgaccgccttgctcctgccgctggccttgctgctccacgccgccaggccggacatccagatgacacagagccctagcagcctgtctgccagcgtgggagacagagtgaccatcacatgcaaggccagcgaccacatcaacaactggctggcctggtatcagcagaagcctggacaggcccctaagctgctgatctacggcgctaccacactggaaacaggcgtgcccagcagattttctggcagcggctctggcaccgactacaccctgacaatatccagcctccagcctgaggacttcgccacctactactgtcagcagagctggaacaccccttggacattcggccagggcaccaagctggaaatcaagagaggcggaggcggaagtggaggcggaggatctggcggcggaggctctcaagttcagcttcaacagcctggcgctgagctggtcaaacctggcgcttctgtgaagatgagctgcaaagccagcggctacgccttcagcagctactggatcaactggatgaagcagaaacccggccagggactcgaatggatcggccaaatctatcccggcgacggcgacaccaactacaacggcaagttcaagggcagagccacactgaccgccgatacctctagcagcacagcctacatgcagctgagcagcctgaccagcgaagatagcgccgtgtacttctgtgcccggtccatcacaacagtcgtgggctgcgctatggactattggggccagggaacaagcgtgaccgtgtctagtacgcgttctggacccgtgaaagagctggtcggttccgttggtggggccgtgactttccccctgaagtccaaagtaaagcaagttgactctattgtctggaccttcaacacaacccctcttgtcaccatacagccagaagggggcactatcatagtgacccaaaatcgtaatagggagagagtagacttcccagatggaggctactccctgaagctcagcaaactgaagaagaatgactcagggatctactatgtggggatatacagctcatcactccagcagccctccacccaggagtacgtgctgcatgtctacgagcacctgtcaaagcctaaagtcaccatgggtctgcagagcaataagaatggcacctgtgtgaccaatctgacatgctgcatggaacatggggaagaggatgtgatttatacctggaaggccctggggcaagcagccaatgagtcccataatgggtccatcctccccatctcctggagatggggagaaagtgatatgaccttcatctgcgttgccaggaaccctgtcagcagaaacttctcaagccccatccttgccaggaagctctgtgaaggtgctgctgatgacccagattcctccatggtcctcctgtgtctcctgttggtgcccctcctgctcagtctctttgtactggggctatttctttggtttctgaagagagagagacaagaagagtacattgaagagaagaagagagtggacatttgtcgggaaactcctaacatatgcccccattctggagagaacacagagtacgacacaatccctcacactaatagaacaatcctaaaggaagatccagcaaatacggtttactccactgtggaaataccgaaaaagatggaaaatccccactcactgctcacgatgccagacacaccaaggctatttgcctatgagaatgttatc

SEQ ID NO: 8795 - DNA, 1527 bp, Artificial Sequence
  Synthetic Polynucleotide
atggccttaccagtgaccgccttgctcctgccgctggccttgctgctccacgccgccaggccggacatccagatgacacagagccctagcagcctgtctgccagcgtgggagacagagtgaccatcacatgcaaggccagcgaccacatcaacaactggctggcctggtatcagcagaagcctggacaggcccctaagctgctgatctacggcgctaccacactggaaacaggcgtgcccagcagattttctggcagcggctctggcaccgactacaccctgacaatatccagcctccagcctgaggacttcgccacctactactgtcagcagagctggaacaccccttggacattcggccagggcaccaagctggaaatcaagagaggcggaggcggaagtggaggcggaggatctggcggcggaggctctcaagttcagcttcaacagcctggcgctgagctggtcaaacctggcgcttctgtgaagatgagctgcaaagccagcggctacgccttcagcagctactggatcaactggatgaagcagaaacccggccagggactcgaatggatcggccaaatctatcccggcgacggcgacaccaactacaacggcaagttcaagggcagagccacactgaccgccgatacctctagcagcacagcctacatgcagctgagcagcctgaccagcgaagatagcgccgtgtacttctgtgcccggtccatcacaacagtcgtgggctgcgctatggactattggggccagggaacaagcgtgaccgtgtctagtacgcgtgctactccagcccccaagagctgcccagagaggcactactgggctcagggaaagctgtgctgccagatgtgtgagccaggaacattcctcgtgaaggactgtgaccagcatagaaaggctgctcagtgtgatccttgcataccgggggtctccttctctcctgaccaccacacccggccccactgtgagagctgtcggcactgtaactctggtcttctcgttcgcaactgcaccatcactgccaatgctgagtgtgcctgtcgcaatggctggcagtgcagggacaaggagtgcaccgagtgtgatcctcttccaaacccttcgctgaccgctcggtcgtctcaggccctgagcccacaccctcagcccacccacttaccttatgtcagtgagatgctggaggccaggacagctgggcacatgcagactctggctgacttcaggcagctgcctgcccggactctctctacccactggccaccccaaagatccctgtgcagctccgattttattcgcatccttgtgatcttctctggaatgttccttgttttcaccctggccggggccctgttcctccatcaacgaaggaaatatagatcaaacaaaggagaaagtcctgtggagcctgcagagccttgtcattacagctgccccagggaggaggagggcagcaccatccccatccaggaggattaccgaaaaccggagcctgcctgctccccctga

SEQ ID NO: 8796 - DNA, 2691 bp, Artificial Sequence
  Synthetic Polynucleotide
atggccttaccagtgaccgccttgctcctgccgctggccttgctgctccacgccgccaggccggacatccagatgacacagagccctagcagcctgtctgccagcgtgggagacagagtgaccatcacatgcaaggccagcgaccacatcaacaactggctggcctggtatcagcagaagcctggacaggcccctaagctgctgatctacggcgctaccacactggaaacaggcgtgcccagcagattttctggcagcggctctggcaccgactacaccctgacaatatccagcctccagcctgaggacttcgccacctactactgtcagcagagctggaacaccccttggacattcggccagggcaccaagctggaaatcaagagaggcggaggcggaagtggaggcggaggatctggcggcggaggctctcaagttcagcttcaacagcctggcgctgagctggtcaaacctggcgcttctgtgaagatgagctgcaaagccagcggctacgccttcagcagctactggatcaactggatgaagcagaaacccggccagggactcgaatggatcggccaaatctatcccggcgacggcgacaccaactacaacggcaagttcaagggcagagccacactgaccgccgatacctctagcagcacagcctacatgcagctgagcagcctgaccagcgaagatagcgccgtgtacttctgtgcccggtccatcacaacagtcgtgggctgcgctatggactattggggccagggaacaagcgtgaccgtgtctagtacgcgtgggcacctccccaagcccaccctctgggctgaaccaggctctgtgatcacccaggggagtcctgtgaccctcaggtgtcaggggggccaggagacccaggagtaccgtctatatagagaaaagaaaacagcaccctggattacacggatcccacaggagcttgtgaagaagggccagttccccatcccatccatcacctgggaacacacagggcggtatcgctgttactatggtagcgacactgcaggccgctcagagagcagtgaccccctggagctggtggtgacaggagcctacatcaaacccaccctctcagcccagcccagccccgtggtgaactcaggagggaatgtaaccctccagtgtgactcacaggtggcatttgatggcttcattctgtgtaaggaaggagaagatgaacacccacaatgcctgaactcccagccccatgcccgtgggtcgtcccgcgccatcttctccgtgggccccgtgagcccgagtcgcaggtggtggtacaggtgctatgcttatgactcgaactctccctatgagtggtctctacccagtgatctcctggagctcctggtcctaggtgtttctaagaagccatcactctcagtgcagccaggtcctatcgtggcccctgaggagaccctgactctgcagtgtggctctgatgctggctacaacagatttgttctgtataaggacggggaacgtgacttccttcagctcgctggcgcacagccccaggctgggctctcccaggccaacttcaccctgggccctgtgagccgctcctacgggggccagtacagatgctacggtgcacacaacctctcctccgagtggtcggcccccagcgaccccctggacatcctgatcgcaggacagttctatgacagagtctccctctcggtgcagccgggccccacggtggcctcaggagagaacgtgaccctgctgtgtcagtcacagggatggatgcaaactttccttctgaccaaggagggggcagctgatgacccatggcgtctaagatcaacgtaccaatctcaaaaataccaggctgaattccccatgggtcctgtgacctcagcccatgcggggacctacaggtgctacggctcacagagctccaaaccctacctgctgactcaccccagtgaccccctggagctcgtggtctcaggaccgtctgggggccccagctccccgacaacaggccccacctccacatctgcaggccctgaggaccagcccctcacccccaccgggtcggatccccagagtggtctgggaaggcacctgggggttgtgatcggcatcttggtggccgtcatcctactgctcctcctcctcctcctcctcttcctcatcctccgacatcgacgtcagggcaaacactggacatcgacccagagaaaggctgatttccaacatcctgcaggggctgtggggccagagcccacagacagaggcctgcagtggaggtccagcccagctgccgatgcccaggaagaaaacctctatgctgccgtgaagcacacacagcctgaggatggggtggagatggacactcggcagagcccacacgatgaagacccccaggcagtgacgtatgccgaggtgaaacactccagacctaggagagaaatggcctctcctccttccccactgtctggggaattcctggacacaaaggacagacaggcggaagaggacaggcagatggacactgaggctgctgcatctgaagccccccaggatgtgacctacgcccagctgcacagcttgaccctcagacgggaggcaactgagcctcctccatcccaggaagggccctctccagctgtgcccagcatctacgccactctggccatccactag

SEQ ID NO: 8797 - DNA, 1602 bp, Artificial Sequence
  Synthetic Polynucleotide
atggccttaccagtgaccgccttgctcctgccgctggccttgctgctccacgccgccaggccggacatccagatgacacagagccctagcagcctgtctgccagcgtgggagacagagtgaccatcacatgcaaggccagcgaccacatcaacaactggctggcctggtatcagcagaagcctggacaggcccctaagctgctgatctacggcgctaccacactggaaacaggcgtgcccagcagattttctggcagcggctctggcaccgactacaccctgacaatatccagcctccagcctgaggacttcgccacctactactgtcagcagagctggaacaccccttggacattcggccagggcaccaagctggaaatcaagagaggcggaggcggaagtggaggcggaggatctggcggcggaggctctcaagttcagcttcaacagcctggcgctgagctggtcaaacctggcgcttctgtgaagatgagctgcaaagccagcggctacgccttcagcagctactggatcaactggatgaagcagaaacccggccagggactcgaatggatcggccaaatctatcccggcgacggcgacaccaactacaacggcaagttcaagggcagagccacactgaccgccgatacctctagcagcacagcctacatgcagctgagcagcctgaccagcgaagatagcgccgtgtacttctgtgcccggtccatcacaacagtcgtgggctgcgctatggactattggggccagggaacaagcgtgaccgtgtctagtacgcgtcaggaggaagatctgcccagaccctccatctcggctgagccaggcaccgtgatccccctggggagccatgtgactttcgtgtgccggggcccggttggggttcaaacattccgcctggagagggacagtagatccacatacaatgatactgaagatgtgtctcaagctagtccatctgagtcagaggccagattccgcattgactcagtaagagaaggaaatgccgggctttatcgctgcatctattataagccccctaaatggtctgagcagagtgactacctggagctgctggtgaaagaaagctctggaggcccggactccccggacacagagcccggctcctcagctggacccacgcagaggccgtcggacaacagtcacaatgagcatgcacctgcttcccaaggcctgaaagctgagcatctgtatattctcatcggggtctcagtggtcttcctcttctgtctcctcctcctggtcctcttctgcctccatcgccagaatcagataaagcaggggccccccagaagcaaggacgaggagcagaagccacagcagaggcctgacctggctgttgatgttctagagaggacagcagacaaggccacagtcaatggacttcctgagaaggacagagagacggacacctcggccctggctgcagggagttcccaggaggtgacgtatgctcagctggaccactgggccctcacacagaggacagcccgggctgtgtccccacagtccacaaagcccatggccgagtccatcacgtatgcagccgttgccagacactga

SEQ ID NO: 8798 - DNA, 1497 bp, Artificial Sequence; identical to SEQ ID NO: 5496
  Synthetic Polynucleotide

SEQ ID NO: 8799 - DNA, 1407 bp, Artificial Sequence; identical to SEQ ID NO: 5560
  Synthetic Polynucleotide

SEQ ID NO: 8800 - DNA, 1548 bp, Artificial Sequence; identical to SEQ ID NO: 5624
  Synthetic Polynucleotide

SEQ ID NO: 8801 - DNA, 1839 bp, Artificial Sequence; identical to SEQ ID NO: 5688
  Synthetic Polynucleotide

SEQ ID NO: 8802 - DNA, 1605 bp, Artificial Sequence; identical to SEQ ID NO: 5752
  Synthetic Polynucleotide

SEQ ID NO: 8803 - DNA, 1881 bp, Artificial Sequence; identical to SEQ ID NO: 5816
  Synthetic Polynucleotide

SEQ ID NO: 8804 - DNA, 1077 bp, Artificial Sequence
  Synthetic Polynucleotide
atggccttaccagtgaccgccttgctcctgccgctggccttgctgctccacgccgccaggccggacatccagatgacacagagccctagcagcctgtctgccagcgtgggagacagagtgaccatcacatgcaaggccagcgaccacatcaacaactggctggcctggtatcagcagaagcctggacaggcccctaagctgctgatctacggcgctaccacactggaaacaggcgtgcccagcagattttctggcagcggctctggcaccgactacaccctgacaatatccagcctccagcctgaggacttcgccacctactactgtcagcagagctggaacaccccttggacattcggccagggcaccaagctggaaatcaagagaggcggaggcggaagtggaggcggaggatctggcggcggaggctctcaagttcagcttcaacagcctggcgctgagctggtcaaacctggcgcttctgtgaagatgagctgcaaagccagcggctacgccttcagcagctactggatcaactggatgaagcagaaacccggccagggactcgaatggatcggccaaatctatcccggcgacggcgacaccaactacaacggcaagttcaagggcagagccacactgaccgccgatacctctagcagcacagcctacatgcagctgagcagcctgaccagcgaagatagcgccgtgtacttctgtgcccggtccatcacaacagtcgtgggctgcgctatggactattggggccagggaacaagcgtgaccgtgtctagtacgcgtaaaattgaagttatgtatcctcctccttacctagacaatgagaagagcaatggaaccattatccatgtgaaaggggcgcgtatcacccagggcctggccgtgtctaccatcagcagctttttcccacccggctaccaggtgtccttctgcctcgtgatggtgctgctgttcgccgtggacaccggcctgtacttcagcgtgaaaacaaacatccggtccagcaccagagactggaaggaccacaagttcaagtggcggaaggacccccaggacaag

SEQ ID NO: 8805 - DNA, 1077 bp, Artificial Sequence
  Synthetic Polynucleotide
atggccttaccagtgaccgccttgctcctgccgctggccttgctgctccacgccgccaggccggacatccagatgacacagagccctagcagcctgtctgccagcgtgggagacagagtgaccatcacatgcaaggccagcgaccacatcaacaactggctggcctggtatcagcagaagcctggacaggcccctaagctgctgatctacggcgctaccacactggaaacaggcgtgcccagcagattttctggcagcggctctggcaccgactacaccctgacaatatccagcctccagcctgaggacttcgccacctactactgtcagcagagctggaacaccccttggacattcggccagggcaccaagctggaaatcaagagaggcggaggcggaagtggaggcggaggatctggcggcggaggctctcaagttcagcttcaacagcctggcgctgagctggtcaaacctggcgcttctgtgaagatgagctgcaaagccagcggctacgccttcagcagctactggatcaactggatgaagcagaaacccggccagggactcgaatggatcggccaaatctatcccggcgacggcgacaccaactacaacggcaagttcaagggcagagccacactgaccgccgatacctctagcagcacagcctacatgcagctgagcagcctgaccagcgaagatagcgccgtgtacttctgtgcccggtccatcacaacagtcgtgggctgcgctatggactattggggccagggaacaagcgtgaccgtgtctagtacgcgtaaaattgaagttatgtatcctcctccttacctagacaatgagaagagcaatggaaccattatccatgtgaaaggggcgcgtattacccaaggactggctgtgcctacaatctctagcttctttccgcctggataccaagtctccttctgtcttgtgatggtcctcctgtttgctgtggacacaggactgtacttttccgtgaaaacgaacatccgcagctccacacgcgattggaaagatcacaagtttaaatggcgcaaagatccccaggacaag

SEQ ID NO: 8806 - DNA, 1014 bp, Artificial Sequence
  Synthetic Polynucleotide
atggccttaccagtgaccgccttgctcctgccgctggccttgctgctccacgccgccaggccggacatccagatgacacagagccctagcagcctgtctgccagcgtgggagacagagtgaccatcacatgcaaggccagcgaccacatcaacaactggctggcctggtatcagcagaagcctggacaggcccctaagctgctgatctacggcgctaccacactggaaacaggcgtgcccagcagattttctggcagcggctctggcaccgactacaccctgacaatatccagcctccagcctgaggacttcgccacctactactgtcagcagagctggaacaccccttggacattcggccagggcaccaagctggaaatcaagagaggcggaggcggaagtggaggcggaggatctggcggcggaggctctcaagttcagcttcaacagcctggcgctgagctggtcaaacctggcgcttctgtgaagatgagctgcaaagccagcggctacgccttcagcagctactggatcaactggatgaagcagaaacccggccagggactcgaatggatcggccaaatctatcccggcgacggcgacaccaactacaacggcaagttcaagggcagagccacactgaccgccgatacctctagcagcacagcctacatgcagctgagcagcctgaccagcgaagatagcgccgtgtacttctgtgcccggtccatcacaacagtcgtgggctgcgctatggactattggggccagggaacaagcgtgaccgtgtctagtacgcgtaaaattgaagttatgtatcctcctccttacctagacaatgagaagagcaatggaaccattatccatgtgaaaggggcgcgtattacccaaggactggctgtgtctacaatctctagcttctctccgcctggataccaagtctccttctgtcttgtgatggtcctcctgtttgctgtggacacaggactgtacttttccgtgaaaacgaacatc

SEQ ID NO: 8807 - DNA, 1107 bp, Artificial Sequence
  Synthetic Polynucleotide
atggccttaccagtgaccgccttgctcctgccgctggccttgctgctccacgccgccaggccggacatccagatgacacagagccctagcagcctgtctgccagcgtgggagacagagtgaccatcacatgcaaggccagcgaccacatcaacaactggctggcctggtatcagcagaagcctggacaggcccctaagctgctgatctacggcgctaccacactggaaacaggcgtgcccagcagattttctggcagcggctctggcaccgactacaccctgacaatatccagcctccagcctgaggacttcgccacctactactgtcagcagagctggaacaccccttggacattcggccagggcaccaagctggaaatcaagagaggcggaggcggaagtggaggcggaggatctggcggcggaggctctcaagttcagcttcaacagcctggcgctgagctggtcaaacctggcgcttctgtgaagatgagctgcaaagccagcggctacgccttcagcagctactggatcaactggatgaagcagaaacccggccagggactcgaatggatcggccaaatctatcccggcgacggcgacaccaactacaacggcaagttcaagggcagagccacactgaccgccgatacctctagcagcacagcctacatgcagctgagcagcctgaccagcgaagatagcgccgtgtacttctgtgcccggtccatcacaacagtcgtgggctgcgctatggactattggggccagggaacaagcgtgaccgtgtctagtacgcgtaaaattgaagttatgtatcctcctccttacctagacaatgagaagagcaatggaaccattatccatgtgaaaggggcgcgtgtcgagaaagaacatccacagcttggcgctggcaccgtcctgttgcttagagccggattctatgccgtcagcttcctgtccgtggctgtggggtctacagtgtattaccagggaaaatgtctcacctggaaaggccccagacgccagcttccagctgttgttcctgctccactgccaccaccttgtggctcctctgctcacttgcttccaccagtgcctggcgga

SEQ ID NO: 8808 - DNA, 1350 bp, Artificial Sequence
  Synthetic Polynucleotide
atggccttaccagtgaccgccttgctcctgccgctggccttgctgctccacgccgccaggccggacatccagatgacacagagccctagcagcctgtctgccagcgtgggagacagagtgaccatcacatgcaaggccagcgaccacatcaacaactggctggcctggtatcagcagaagcctggacaggcccctaagctgctgatctacggcgctaccacactggaaacaggcgtgcccagcagattttctggcagcggctctggcaccgactacaccctgacaatatccagcctccagcctgaggacttcgccacctactactgtcagcagagctggaacaccccttggacattcggccagggcaccaagctggaaatcaagagaggcggaggcggaagtggaggcggaggatctggcggcggaggctctcaagttcagcttcaacagcctggcgctgagctggtcaaacctggcgcttctgtgaagatgagctgcaaagccagcggctacgccttcagcagctactggatcaactggatgaagcagaaacccggccagggactcgaatggatcggccaaatctatcccggcgacggcgacaccaactacaacggcaagttcaagggcagagccacactgaccgccgatacctctagcagcacagcctacatgcagctgagcagcctgaccagcgaagatagcgccgtgtacttctgtgcccggtccatcacaacagtcgtgggctgcgctatggactattggggccagggaacaagcgtgaccgtgtctagtacgcgtaaaattgaagttatgtatcctcctccttacctagacaatgagaagagcaatggaaccattatccatgtgaaaggggcgcgtaagtctgtgcgcttttacctggtcgtcagccctgccagtgcctccactcagacatcttggaccccaagggaccttgtgtcctctcagacacagacacagtcctgcgtgccaccaactgctggcgcaagacaggctccagagtctcccagcacaatccccgtcccttctcagccccagaactccacacttaggccaggaccagctgctccaatcgcactggtcccagtgttctgcggactgctggttgccaagtctctggtgctgagcgcactcctcgtttggtggggcgatatttggtggaaaacgatgatggaattgagatccctcgatacgcagaaagccacatgccaccttcagcaagtcacagacttgccttggaccagcgtcagctctcccgtggaacgggaaattctgtatcatacagtggcccgcaccaagatttccgacgatgacgacgagcacacactg

SEQ ID NO: 8809 - DNA, 1161 bp, Artificial Sequence
  Synthetic Polynucleotide
atggccttaccagtgaccgccttgctcctgccgctggccttgctgctccacgccgccaggccggacatccagatgacacagagccctagcagcctgtctgccagcgtgggagacagagtgaccatcacatgcaaggccagcgaccacatcaacaactggctggcctggtatcagcagaagcctggacaggcccctaagctgctgatctacggcgctaccacactggaaacaggcgtgcccagcagattttctggcagcggctctggcaccgactacaccctgacaatatccagcctccagcctgaggacttcgccacctactactgtcagcagagctggaacaccccttggacattcggccagggcaccaagctggaaatcaagagaggcggaggcggaagtggaggcggaggatctggcggcggaggctctcaagttcagcttcaacagcctggcgctgagctggtcaaacctggcgcttctgtgaagatgagctgcaaagccagcggctacgccttcagcagctactggatcaactggatgaagcagaaacccggccagggactcgaatggatcggccaaatctatcccggcgacggcgacaccaactacaacggcaagttcaagggcagagccacactgaccgccgatacctctagcagcacagcctacatgcagctgagcagcctgaccagcgaagatagcgccgtgtacttctgtgcccggtccatcacaacagtcgtgggctgcgctatggactattggggccagggaacaagcgtgaccgtgtctagtacgcgtaaaattgaagttatgtatcctcctccttacctagacaatgagaagagcaatggaaccattatccatgtgaaaggggcgcgtggcgatattgagaatacctctctggccccagaagatcctacattccccgccgacacatggggaacatatctgctgacaaccgaaaccgggctgcaaaaggaccatgctctgtgggatcataccgctcagaatctgcttcggatggggcttgcattcctggtcctggtggctcttgtctggtttctggtcgaggactggctgtcccggaagagaaccagagaaagagcttccagggccagcacctgggaaggcagacgcagactgaatactcagaccctg

SEQ ID NO: 8810 - DNA, 1263 bp, Artificial Sequence
  Synthetic Polynucleotide
atggccttaccagtgaccgccttgctcctgccgctggccttgctgctccacgccgccaggccggacatccagatgacacagagccctagcagcctgtctgccagcgtgggagacagagtgaccatcacatgcaaggccagcgaccacatcaacaactggctggcctggtatcagcagaagcctggacaggcccctaagctgctgatctacggcgctaccacactggaaacaggcgtgcccagcagattttctggcagcggctctggcaccgactacaccctgacaatatccagcctccagcctgaggacttcgccacctactactgtcagcagagctggaacaccccttggacattcggccagggcaccaagctggaaatcaagagaggcggaggcggaagtggaggcggaggatctggcggcggaggctctcaagttcagcttcaacagcctggcgctgagctggtcaaacctggcgcttctgtgaagatgagctgcaaagccagcggctacgccttcagcagctactggatcaactggatgaagcagaaacccggccagggactcgaatggatcggccaaatctatcccggcgacggcgacaccaactacaacggcaagttcaagggcagagccacactgaccgccgatacctctagcagcacagcctacatgcagctgagcagcctgaccagcgaagatagcgccgtgtacttctgtgcccggtccatcacaacagtcgtgggctgcgctatggactattggggccagggaacaagcgtgaccgtgtctagtacgcgtaaaattgaagttatgtatcctcctccttacctagacaatgagaagagcaatggaaccattatccatgtgaaaggggcgcgtggaaacccttcaaatagttggccttcacccactgaaccaagctccaaaaccggtaacccccgacacctgcacattctgattgggacctcagtggtcatcatcctcttcatcctcctcttctttctccttcatcgctggtgctccaacaaaaaaaatgctgcggtaatggaccaagagtctgcaggaaacagaacagcgaatagcgaggactctgatgaacaagaccctcaggaggtgacatacacacagttgaatcactgcgttttcacacagagaaaaatcactcgcccttctcagaggcccaagacacccccaacagatatcatcgtgtacacggaacttccaaatgctgagtccagatccaaagttgtctcctgccca

SEQ ID NO: 8811 - DNA, 1311 bp, Artificial Sequence
  Synthetic Polynucleotide
atggccttaccagtgaccgccttgctcctgccgctggccttgctgctccacgccgccaggccggacatccagatgacacagagccctagcagcctgtctgccagcgtgggagacagagtgaccatcacatgcaaggccagcgaccacatcaacaactggctggcctggtatcagcagaagcctggacaggcccctaagctgctgatctacggcgctaccacactggaaacaggcgtgcccagcagattttctggcagcggctctggcaccgactacaccctgacaatatccagcctccagcctgaggacttcgccacctactactgtcagcagagctggaacaccccttggacattcggccagggcaccaagctggaaatcaagagaggcggaggcggaagtggaggcggaggatctggcggcggaggctctcaagttcagcttcaacagcctggcgctgagctggtcaaacctggcgcttctgtgaagatgagctgcaaagccagcggctacgccttcagcagctactggatcaactggatgaagcagaaacccggccagggactcgaatggatcggccaaatctatcccggcgacggcgacaccaactacaacggcaagttcaagggcagagccacactgaccgccgatacctctagcagcacagcctacatgcagctgagcagcctgaccagcgaagatagcgccgtgtacttctgtgcccggtccatcacaacagtcgtgggctgcgctatggactattggggccagggaacaagcgtgaccgtgtctagtacgcgtaaaattgaagttatgtatcctcctccttacctagacaatgagaagagcaatggaaccattatccatgtgaaaggggcgcgtccatacgagtggtcaaactcgagtgacccactgcttgtttctgtcacaggaaacccttcaaatagttggccttcacccactgaaccaagctctaaaaccggtaacccccgacacctgcacattctgattgggacctcagtggtcatcatcctcttcatcctcctcttctttctccttcatcgctggtgctccaacaaaaaaaatgctgcggtaatggaccaagagtctgcagggaacagaacagcgaatagcgaggactctgatgaacaagaccctcaggaggtgacatacacacagttgaatcactgcgttttcacacagagaaaaatcactcgcccttctcagaggcccaagacacccccaacagatatcatcgtgtacacggaacttccaaatgctgagtccagatccaaagttgtctcctgccca

SEQ ID NO: 8812 - DNA, 1242 bp, Artificial Sequence
  Synthetic Polynucleotide
atggccttaccagtgaccgccttgctcctgccgctggccttgctgctccacgccgccaggccggacatccagatgacacagagccctagcagcctgtctgccagcgtgggagacagagtgaccatcacatgcaaggccagcgaccacatcaacaactggctggcctggtatcagcagaagcctggacaggcccctaagctgctgatctacggcgctaccacactggaaacaggcgtgcccagcagattttctggcagcggctctggcaccgactacaccctgacaatatccagcctccagcctgaggacttcgccacctactactgtcagcagagctggaacaccccttggacattcggccagggcaccaagctggaaatcaagagaggcggaggcggaagtggaggcggaggatctggcggcggaggctctcaagttcagcttcaacagcctggcgctgagctggtcaaacctggcgcttctgtgaagatgagctgcaaagccagcggctacgccttcagcagctactggatcaactggatgaagcagaaacccggccagggactcgaatggatcggccaaatctatcccggcgacggcgacaccaactacaacggcaagttcaagggcagagccacactgaccgccgatacctctagcagcacagcctacatgcagctgagcagcctgaccagcgaagatagcgccgtgtacttctgtgcccggtccatcacaacagtcgtgggctgcgctatggactattggggccagggaacaagcgtgaccgtgtctagtacgcgtaaaattgaagttatgtatcctcctccttacctagacaatgagaagagcaatggaaccattatccatgtgaaaggggcgcgtggaaacccttcaaatagttggccttcacccactgaaccaagctccgaaaccggtaaccccagacacctgcatgttctgattgggacctcagtggtcatcatcctcttcatcctcctcctcttctttctccttcatcgctggtgctgcaacaaaaaaaatgctgttgtaatggaccaagagcctgcagggaacagaacagtgaacagggaggactctgatgaacaagaccctcaggaggtgacatatgcacagttgaatcactgcgttttcacacagagaaaaatcactcgcccttctcagaggcccaagacacccccaacagatatcatcgtgtacacggaacttccaaatgctgagccc

SEQ ID NO: 8813 - DNA, 1407 bp, Artificial Sequence
  Synthetic Polynucleotide
atggccttaccagtgaccgccttgctcctgccgctggccttgctgctccacgccgccaggccggacatccagatgacacagagccctagcagcctgtctgccagcgtgggagacagagtgaccatcacatgcaaggccagcgaccacatcaacaactggctggcctggtatcagcagaagcctggacaggcccctaagctgctgatctacggcgctaccacactggaaacaggcgtgcccagcagattttctggcagcggctctggcaccgactacaccctgacaatatccagcctccagcctgaggacttcgccacctactactgtcagcagagctggaacaccccttggacattcggccagggcaccaagctggaaatcaagagaggcggaggcggaagtggaggcggaggatctggcggcggaggctctcaagttcagcttcaacagcctggcgctgagctggtcaaacctggcgcttctgtgaagatgagctgcaaagccagcggctacgccttcagcagctactggatcaactggatgaagcagaaacccggccagggactcgaatggatcggccaaatctatcccggcgacggcgacaccaactacaacggcaagttcaagggcagagccacactgaccgccgatacctctagcagcacagcctacatgcagctgagcagcctgaccagcgaagatagcgccgtgtacttctgtgcccggtccatcacaacagtcgtgggctgcgctatggactattggggccagggaacaagcgtgaccgtgtctagtacgcgtaaaattgaagttatgtatcctcctccttacctagacaatgagaagagcaatggaaccattatccatgtgaaaggggcgcgtccctatgagtggtcagacccgagtgacccactgcttgtttctgtcacaggaaactcttcaagtagttcatcttcacccactgaaccaagctccaaaactggtatccgcagacacctgcacattctgattgggacctcagtggctatcatcctcttcatcatcctcttcttctttctccttcattgctgctgctccaacaaaaagaatgctgctgtaatggaccaagagcctgccggggacagaacagtgaacagggaggactctgatgatcaagaccctcaggaggtgacatatgcacagttggatcactgcgttttcacacagacaaaaatcacttccccttctcagaggcccaagacacctccaacagataccaccatgtacatggaacttccaaatgctaagccaagatcattgtctcctgcccataagcaccacagtcaggccttgaggggatcttctagggagacaacagccctgtctcaaaaccgggttgctagctcccatgtaccagcagctggaatc

SEQ ID NO: 8814 - DNA, 1407 bp, Artificial Sequence
  Synthetic Polynucleotide
atggccttaccagtgaccgccttgctcctgccgctggccttgctgctccacgccgccaggccggacatccagatgacacagagccctagcagcctgtctgccagcgtgggagacagagtgaccatcacatgcaaggccagcgaccacatcaacaactggctggcctggtatcagcagaagcctggacaggcccctaagctgctgatctacggcgctaccacactggaaacaggcgtgcccagcagattttctggcagcggctctggcaccgactacaccctgacaatatccagcctccagcctgaggacttcgccacctactactgtcagcagagctggaacaccccttggacattcggccagggcaccaagctggaaatcaagagaggcggaggcggaagtggaggcggaggatctggcggcggaggctctcaagttcagcttcaacagcctggcgctgagctggtcaaacctggcgcttctgtgaagatgagctgcaaagccagcggctacgccttcagcagctactggatcaactggatgaagcagaaacccggccagggactcgaatggatcggccaaatctatcccggcgacggcgacaccaactacaacggcaagttcaagggcagagccacactgaccgccgatacctctagcagcacagcctacatgcagctgagcagcctgaccagcgaagatagcgccgtgtacttctgtgcccggtccatcacaacagtcgtgggctgcgctatggactattggggccagggaacaagcgtgaccgtgtctagtacgcgtaaaattgaagttatgtatcctcctccttacctagacaatgagaagagcaatggaaccattatccatgtgaaaggggcgcgtccctatgagtggtcagacccgagtgacccactgcttgtttctgtcacaggaaactcttcaagtagttcatcttcacccactgaaccaagctccaaaactggtatccgcagacacctgcacattctgattgggacctcagtggctatcatcctcttcatcatcctcttcttctttctccttcattgctgctgctccaacaaaaagaatgctgctgtaatggaccaagggcctgccggggacagaacagtgaacagggaggactctgatgatcaagaccctcaggaggtgacatatgcacagttggatcactgcgttttcacacagacaaaaatcacttccccttctcagaggcccaaggcacctccaacagataccaccatgtacatggaacttccaaatgctaagccaagatcattgtctcctgcccataagcaccacagtcaggccttgaggggatcttctagggagacaacagccctgtctcaaaaccgggttgctagctcccatgtaccagcagctggaatc

SEQ ID NO: 8815 - DNA, 1267 bp, Artificial Sequence
  Synthetic Polynucleotide
atggccttaccagtgaccgccttgctcctgccgctggccttgctgctccacgccgccaggccggacatccagatgacacagagccctagcagcctgtctgccagcgtgggagacagagtgaccatcacatgcaaggccagcgaccacatcaacaactggctggcctggtatcagcagaagcctggacaggcccctaagctgctgatctacggcgctaccacactggaaacaggcgtgcccagcagattttctggcagcggctctggcaccgactacaccctgacaatatccagcctccagcctgaggacttcgccacctactactgtcagcagagctggaacaccccttggacattcggccagggcaccaagctggaaatcaagagaggcggaggcggaagtggaggcggaggatctggcggcggaggctctcaagttcagcttcaacagcctggcgctgagctggtcaaacctggcgcttctgtgaagatgagctgcaaagccagcggctacgccttcagcagctactggatcaactggatgaagcagaaacccggccagggactcgaatggatcggccaaatctatcccggcgacggcgacaccaactacaacggcaagttcaagggcagagccacactgaccgccgatacctctagcagcacagcctacatgcagctgagcagcctgaccagcgaagatagcgccgtgtacttctgtgcccggtccatcacaacagtcgtgggctgcgctatggactattggggccagggaacaagcgtgaccgtgtctagtacgcgtaaaattgaagttatgtatcctcctccttacctagacaatgagaagagcaatggaaccattatccatgtgaaaggggcgcgtaggaaacccttcaagtagttggccttcacccacagaaccaagctccaaatctggtaaccccagacacctgcacattctgattgggacctcagtggtcatcatcctcttcatcctcctcctcttctttctccttcatctctggtgctccaacaaaaaaaatgctgctgtaatggaccaagagcctgcagggaacagaacagccaacagcgaggactctgatgaacaagaccctgaggaggtgacatacgcacagttggatcactgcgttttcacacagagaaaaatcactcgcccttctcagaggcccaagacaccccctacagataccatcttgtacacggaacttccaaatgctaagcccagatccaaagttgtctcctgccca

SEQ ID NO: 8816 - DNA, 1296 bp, Artificial Sequence
  Synthetic Polynucleotide
atggccttaccagtgaccgccttgctcctgccgctggccttgctgctccacgccgccaggccggacatccagatgacacagagccctagcagcctgtctgccagcgtgggagacagagtgaccatcacatgcaaggccagcgaccacatcaacaactggctggcctggtatcagcagaagcctggacaggcccctaagctgctgatctacggcgctaccacactggaaacaggcgtgcccagcagattttctggcagcggctctggcaccgactacaccctgacaatatccagcctccagcctgaggacttcgccacctactactgtcagcagagctggaacaccccttggacattcggccagggcaccaagctggaaatcaagagaggcggaggcggaagtggaggcggaggatctggcggcggaggctctcaagttcagcttcaacagcctggcgctgagctggtcaaacctggcgcttctgtgaagatgagctgcaaagccagcggctacgccttcagcagctactggatcaactggatgaagcagaaacccggccagggactcgaatggatcggccaaatctatcccggcgacggcgacaccaactacaacggcaagttcaagggcagagccacactgaccgccgatacctctagcagcacagcctacatgcagctgagcagcctgaccagcgaagatagcgccgtgtacttctgtgcccggtccatcacaacagtcgtgggctgcgctatggactattggggccagggaacaagcgtgaccgtgtctagtacgcgtaaaattgaagttatgtatcctcctccttacctagacaatgagaagagcaatggaaccattatccatgtgaaaggggcgcgtccctgcgtgtggtcaaactcaagtgacccactgcttgtttctgtcacaggtatctgcagacacctgcatgttctgattgggacctcagtggtcatcttcctcttcatcctcctcctcttctttctcctttatcgctggtgctccaacaaaaagaatgctgctgtaatggaccaagagcctgcgggggacagaacagtgaataggcaggactctgatgaacaagaccctcaggaggtgacgtacgcacagttggatcactgcgttttcatacagagaaaaatcagtcgcccttctcagaggcccaagacacccctaacagataccagcgtgtacacggaacttccaaatgctgagcccagatccaaagttgtctcctgcccacgagcaccacagtcaggtcttgagggggttttc

SEQ ID NO: 8817 - DNA, 1347 bp, Artificial Sequence
  Synthetic Polynucleotide
atggccttaccagtgaccgccttgctcctgccgctggccttgctgctccacgccgccaggccggacatccagatgacacagagccctagcagcctgtctgccagcgtgggagacagagtgaccatcacatgcaaggccagcgaccacatcaacaactggctggcctggtatcagcagaagcctggacaggcccctaagctgctgatctacggcgctaccacactggaaacaggcgtgcccagcagattttctggcagcggctctggcaccgactacaccctgacaatatccagcctccagcctgaggacttcgccacctactactgtcagcagagctggaacaccccttggacattcggccagggcaccaagctggaaatcaagagaggcggaggcggaagtggaggcggaggatctggcggcggaggctctcaagttcagcttcaacagcctggcgctgagctggtcaaacctggcgcttctgtgaagatgagctgcaaagccagcggctacgccttcagcagctactggatcaactggatgaagcagaaacccggccagggactcgaatggatcggccaaatctatcccggcgacggcgacaccaactacaacggcaagttcaagggcagagccacactgaccgccgatacctctagcagcacagcctacatgcagctgagcagcctgaccagcgaagatagcgccgtgtacttctgtgcccggtccatcacaacagtcgtgggctgcgctatggactattggggccagggaacaagcgtgaccgtgtctagtacgcgtaaaattgaagttatgtatcctcctccttacctagacaatgagaagagcaatggaaccattatccatgtgaaaggggcgcgtccctgcgtgtggtcaaactcaagtgacccactgcttgtttctgtcacaggaaacccttcaagtagttggccttcacccacagaaccaagctccaaatctggtatctgcagacacctgcatgttctgattgggacctcagtggtcatcttcctcttcatcctcctcctcttctttctcctttatcgctggtgctccaacaaaaagaatgctgctgtaatggaccaagagcctgcgggggacagaacagtgaataggcaggactctgatgaacaagaccctcaggaggtgacgtacgcacagttggatcactgcgttttcatacagagaaaaatcagtcgcccttctcagaggcccaagacacccctaacagataccagcgtgtacacggaacttccaaatgctgagcccagatccaaagttgtctcctgcccacgagcaccacagtcaggtcttgagggggttttc

SEQ ID NO: 8818 - DNA, 1227 bp, Artificial Sequence
  Synthetic Polynucleotide
atggccttaccagtgaccgccttgctcctgccgctggccttgctgctccacgccgccaggccggacatccagatgacacagagccctagcagcctgtctgccagcgtgggagacagagtgaccatcacatgcaaggccagcgaccacatcaacaactggctggcctggtatcagcagaagcctggacaggcccctaagctgctgatctacggcgctaccacactggaaacaggcgtgcccagcagattttctggcagcggctctggcaccgactacaccctgacaatatccagcctccagcctgaggacttcgccacctactactgtcagcagagctggaacaccccttggacattcggccagggcaccaagctggaaatcaagagaggcggaggcggaagtggaggcggaggatctggcggcggaggctctcaagttcagcttcaacagcctggcgctgagctggtcaaacctggcgcttctgtgaagatgagctgcaaagccagcggctacgccttcagcagctactggatcaactggatgaagcagaaacccggccagggactcgaatggatcggccaaatctatcccggcgacggcgacaccaactacaacggcaagttcaagggcagagccacactgaccgccgatacctctagcagcacagcctacatgcagctgagcagcctgaccagcgaagatagcgccgtgtacttctgtgcccggtccatcacaacagtcgtgggctgcgctatggactattggggccagggaacaagcgtgaccgtgtctagtacgcgtaaaattgaagttatgtatcctcctccttacctagacaatgagaagagcaatggaaccattatccatgtgaaaggggcgcgttctttccgtgccctgccccatgcgtggtcagacccgagtgacccactgcccgtttctgtcacaggtaactccagaaacctgcacgttctgattgggacctcagtggtcatcatcccctttgctatcctcctcttctttctccttcatcgctggtgtgccaacaaaaagaatgctgttgtaatggaccaagagcctgcagggaacagaacagtgaacagggaggactctgatgaacaagaccctcaggaggtgacatacgcacagttgaatcactgcgttttcacacagagaaaaatcactcgcccttctcagaggcccaagacacccccaacagataccagcgtg

SEQ ID NO: 8819 - DNA, 1407 bp, Artificial Sequence
  Synthetic Polynucleotide
atggccttaccagtgaccgccttgctcctgccgctggccttgctgctccacgccgccaggccggacatccagatgacacagagccctagcagcctgtctgccagcgtgggagacagagtgaccatcacatgcaaggccagcgaccacatcaacaactggctggcctggtatcagcagaagcctggacaggcccctaagctgctgatctacggcgctaccacactggaaacaggcgtgcccagcagattttctggcagcggctctggcaccgactacaccctgacaatatccagcctccagcctgaggacttcgccacctactactgtcagcagagctggaacaccccttggacattcggccagggcaccaagctggaaatcaagagaggcggaggcggaagtggaggcggaggatctggcggcggaggctctcaagttcagcttcaacagcctggcgctgagctggtcaaacctggcgcttctgtgaagatgagctgcaaagccagcggctacgccttcagcagctactggatcaactggatgaagcagaaacccggccagggactcgaatggatcggccaaatctatcccggcgacggcgacaccaactacaacggcaagttcaagggcagagccacactgaccgccgatacctctagcagcacagcctacatgcagctgagcagcctgaccagcgaagatagcgccgtgtacttctgtgcccggtccatcacaacagtcgtgggctgcgctatggactattggggccagggaacaagcgtgaccgtgtctagtacgcgtaaaattgaagttatgtatcctcctccttacctagacaatgagaagagcaatggaaccattatccatgtgaaaggggcgcgtccctacgagtggtcagacccgagtgacccactgcctgtttctgtcacaggaaacccttctagtagttggccttcacccactgaaccaagcttcaaaactggtatcgccagacacctgcatgctgtgattaggtactcagtggccatcatcctctttaccatccttcccttctttctccttcatcgctggtgctccaaaaaaaaaaatgctgctgtaatgaaccaagagcctgcgggacacagaacagtgaacagggaggactctgatgaacaagaccctcaggaggtgacatacgcacagttggatcactgcattttcacacagagaaaaatcactggcccttctcagaggagcaagagaccctcaacagataccagcgtgtgtatagaacttccaaatgctgagcccagagcgttgtctcctgcccatgagcaccacagtcaggccttgatgggatcttctagggagacaacagccctgtctcaaacccagcttgccagctctaatgtaccagcagctggaatc

SEQ ID NO: 8820 - DNA, 1095 bp, Artificial Sequence
  Synthetic Polynucleotide
atggccttaccagtgaccgccttgctcctgccgctggccttgctgctccacgccgccaggccggacatccagatgacacagagccctagcagcctgtctgccagcgtgggagacagagtgaccatcacatgcaaggccagcgaccacatcaacaactggctggcctggtatcagcagaagcctggacaggcccctaagctgctgatctacggcgctaccacactggaaacaggcgtgcccagcagattttctggcagcggctctggcaccgactacaccctgacaatatccagcctccagcctgaggacttcgccacctactactgtcagcagagctggaacaccccttggacattcggccagggcaccaagctggaaatcaagagaggcggaggcggaagtggaggcggaggatctggcggcggaggctctcaagttcagcttcaacagcctggcgctgagctggtcaaacctggcgcttctgtgaagatgagctgcaaagccagcggctacgccttcagcagctactggatcaactggatgaagcagaaacccggccagggactcgaatggatcggccaaatctatcccggcgacggcgacaccaactacaacggcaagttcaagggcagagccacactgaccgccgatacctctagcagcacagcctacatgcagctgagcagcctgaccagcgaagatagcgccgtgtacttctgtgcccggtccatcacaacagtcgtgggctgcgctatggactattggggccagggaacaagcgtgaccgtgtctagtacgcgtaaaattgaagttatgtatcctcctccttacctagacaatgagaagagcaatggaaccattatccatgtgaaaggggcgcgtccctacgagtggtcagacccgagtgacccactgcctgtttctgtcacaggaaacccttctagtagttggccttcacccactgaaccaagcttcaaaactggtatcgccagacacctgcatgctgtgattaggtactcagtggccatcatcctctttaccatccttcccttctttctccttcatcgctggtgctccaaaaaaaaaatgctgctg

SEQ ID NO: 8821 - DNA, 1131 bp, Artificial Sequence
  Synthetic Polynucleotide
atggccttaccagtgaccgccttgctcctgccgctggccttgctgctccacgccgccaggccggacatccagatgacacagagccctagcagcctgtctgccagcgtgggagacagagtgaccatcacatgcaaggccagcgaccacatcaacaactggctggcctggtatcagcagaagcctggacaggcccctaagctgctgatctacggcgctaccacactggaaacaggcgtgcccagcagattttctggcagcggctctggcaccgactacaccctgacaatatccagcctccagcctgaggacttcgccacctactactgtcagcagagctggaacaccccttggacattcggccagggcaccaagctggaaatcaagagaggcggaggcggaagtggaggcggaggatctggcggcggaggctctcaagttcagcttcaacagcctggcgctgagctggtcaaacctggcgcttctgtgaagatgagctgcaaagccagcggctacgccttcagcagctactggatcaactggatgaagcagaaacccggccagggactcgaatggatcggccaaatctatcccggcgacggcgacaccaactacaacggcaagttcaagggcagagccacactgaccgccgatacctctagcagcacagcctacatgcagctgagcagcctgaccagcgaagatagcgccgtgtacttctgtgcccggtccatcacaacagtcgtgggctgcgctatggactattggggccagggaacaagcgtgaccgtgtctagtacgcgtaaaattgaagttatgtatcctcctccttacctagacaatgagaagagcaatggaaccattatccatgtgaaaggggcgcgtggaaacccttcaaatagttggccttcacccactgaaccaagctccgaaaccggtaaccccagacacctacatgttctgattgggacctcagtggtcaaaatccctttcaccatcctcctcttctttctccttcatcgctggtgctccgacaaaaaaaatgctgctgtaatggaccaagagcctgcagggaacagaacagtgaacagcgaggattctgatgaacaagaccatcaggaggtgtcatacgca

SEQ ID NO: 8822 - DNA, 1179 bp, Artificial Sequence
  Synthetic Polynucleotide
atggccttaccagtgaccgccttgctcctgccgctggccttgctgctccacgccgccaggccggacatccagatgacacagagccctagcagcctgtctgccagcgtgggagacagagtgaccatcacatgcaaggccagcgaccacatcaacaactggctggcctggtatcagcagaagcctggacaggcccctaagctgctgatctacggcgctaccacactggaaacaggcgtgcccagcagattttctggcagcggctctggcaccgactacaccctgacaatatccagcctccagcctgaggacttcgccacctactactgtcagcagagctggaacaccccttggacattcggccagggcaccaagctggaaatcaagagaggcggaggcggaagtggaggcggaggatctggcggcggaggctctcaagttcagcttcaacagcctggcgctgagctggtcaaacctggcgcttctgtgaagatgagctgcaaagccagcggctacgccttcagcagctactggatcaactggatgaagcagaaacccggccagggactcgaatggatcggccaaatctatcccggcgacggcgacaccaactacaacggcaagttcaagggcagagccacactgaccgccgatacctctagcagcacagcctacatgcagctgagcagcctgaccagcgaagatagcgccgtgtacttctgtgcccggtccatcacaacagtcgtgggctgcgctatggactattggggccagggaacaagcgtgaccgtgtctagtacgcgtaaaattgaagttatgtatcctcctccttacctagacaatgagaagagcaatggaaccattatccatgtgaaaggggcgcgtccctatgagtggtcaaactcgagtgacccactgcttgtttctgtcacaggaaacccttcaaatagttggccttcacccactgaaccaagctccaaaaccggtaaccccagacacctgcatgttctgattgggacctcagtggtcaaaatccctttcaccatcctcctcttctttctccttcatcgctggtgctccaacaaaaaaaatgctgctgtaatggaccaagagcctgcagggaacagaacagtgaacagcgaggattctgatgaacaagaccatcaggaggtgtcatacgca

SEQ ID NO: 8823 - DNA, 1179 bp, Artificial Sequence
  Synthetic Polynucleotide
atggccttaccagtgaccgccttgctcctgccgctggccttgctgctccacgccgccaggccggacatccagatgacacagagccctagcagcctgtctgccagcgtgggagacagagtgaccatcacatgcaaggccagcgaccacatcaacaactggctggcctggtatcagcagaagcctggacaggcccctaagctgctgatctacggcgctaccacactggaaacaggcgtgcccagcagattttctggcagcggctctggcaccgactacaccctgacaatatccagcctccagcctgaggacttcgccacctactactgtcagcagagctggaacaccccttggacattcggccagggcaccaagctggaaatcaagagaggcggaggcggaagtggaggcggaggatctggcggcggaggctctcaagttcagcttcaacagcctggcgctgagctggtcaaacctggcgcttctgtgaagatgagctgcaaagccagcggctacgccttcagcagctactggatcaactggatgaagcagaaacccggccagggactcgaatggatcggccaaatctatcccggcgacggcgacaccaactacaacggcaagttcaagggcagagccacactgaccgccgatacctctagcagcacagcctacatgcagctgagcagcctgaccagcgaagatagcgccgtgtacttctgtgcccggtccatcacaacagtcgtgggctgcgctatggactattggggccagggaacaagcgtgaccgtgtctagtacgcgtaaaattgaagttatgtatcctcctccttacctagacaatgagaagagcaatggaaccattatccatgtgaaaggggcgcgtccctacgagtggtcaaagtcaagtgacccactgcttgtttctgtcacaggaaacccttcaaatagttggccttcacccactgaaccaagctccaaaaccggtaaccccagacacctacacgttctgattgggacctcagtggtcaaactccctttcaccatcctcctcttctttctccttcatcgctggtgctccgacaaaaaaaatgcatctgtaatggaccaagggcctgcggggaacagaacagtgaacagggaggattctgacgaacaggaccatcaggaggtgtcatacgca

SEQ ID NO: 8824 - DNA, 1131 bp, Artificial Sequence
  Synthetic Polynucleotide
atggccttaccagtgaccgccttgctcctgccgctggccttgctgctccacgccgccaggccggacatccagatgacacagagccctagcagcctgtctgccagcgtgggagacagagtgaccatcacatgcaaggccagcgaccacatcaacaactggctggcctggtatcagcagaagcctggacaggcccctaagctgctgatctacggcgctaccacactggaaacaggcgtgcccagcagattttctggcagcggctctggcaccgactacaccctgacaatatccagcctccagcctgaggacttcgccacctactactgtcagcagagctggaacaccccttggacattcggccagggcaccaagctggaaatcaagagaggcggaggcggaagtggaggcggaggatctggcggcggaggctctcaagttcagcttcaacagcctggcgctgagctggtcaaacctggcgcttctgtgaagatgagctgcaaagccagcggctacgccttcagcagctactggatcaactggatgaagcagaaacccggccagggactcgaatggatcggccaaatctatcccggcgacggcgacaccaactacaacggcaagttcaagggcagagccacactgaccgccgatacctctagcagcacagcctacatgcagctgagcagcctgaccagcgaagatagcgccgtgtacttctgtgcccggtccatcacaacagtcgtgggctgcgctatggactattggggccagggaacaagcgtgaccgtgtctagtacgcgtaaaattgaagttatgtatcctcctccttacctagacaatgagaagagcaatggaaccattatccatgtgaaaggggcgcgtggcaatcccagcaatagctggccctctccaacagagcccagcagcaagacaggcaaccccagacatctgcacgtgctgatcggaaccagcgtggtcaagatcccctttacaatcctgctgttctttctgctccatcggtggtgcagcgacaagaaaaacgccgccgtgatggaccaagagcctgccggcaatagaaccgtgaacagcgaggatagcgacgagcaggaccaccaagaggtgtcctatgct

SEQ ID NO: 8825 - DNA, 1182 bp, Artificial Sequence
  Synthetic Polynucleotide
atggccttaccagtgaccgccttgctcctgccgctggccttgctgctccacgccgccaggccggacatccagatgacacagagccctagcagcctgtctgccagcgtgggagacagagtgaccatcacatgcaaggccagcgaccacatcaacaactggctggcctggtatcagcagaagcctggacaggcccctaagctgctgatctacggcgctaccacactggaaacaggcgtgcccagcagattttctggcagcggctctggcaccgactacaccctgacaatatccagcctccagcctgaggacttcgccacctactactgtcagcagagctggaacaccccttggacattcggccagggcaccaagctggaaatcaagagaggcggaggcggaagtggaggcggaggatctggcggcggaggctctcaagttcagcttcaacagcctggcgctgagctggtcaaacctggcgcttctgtgaagatgagctgcaaagccagcggctacgccttcagcagctactggatcaactggatgaagcagaaacccggccagggactcgaatggatcggccaaatctatcccggcgacggcgacaccaactacaacggcaagttcaagggcagagccacactgaccgccgatacctctagcagcacagcctacatgcagctgagcagcctgaccagcgaagatagcgccgtgtacttctgtgcccggtccatcacaacagtcgtgggctgcgctatggactattggggccagggaacaagcgtgaccgtgtctagtacgcgtaaaattgaagttatgtatcctcctccttacctagacaatgagaagagcaatggaaccattatccatgtgaaaggggcgcgtccatacgagtggtcaaagtcaagtgacccactgcttgtttctgtcacaggaaactcttcaaatagttggccttcacccactgaaccaagctccgaaaccggtaaccccagacacctacacgttctgattgggacctcagtggtcaaactccctttcaccatcctcctcttctttctccttcatcgctggtgctccaacaaaaaaaatgcatctgtaatggaccaagggcctgcggggaacagaacagtgaacagggaggattctgatgaacaggaccatcaggaggtgtcatacgcataa

SEQ ID NO: 8826 - DNA, 1080 bp, Artificial Sequence
  Synthetic Polynucleotide
atggccttaccagtgaccgccttgctcctgccgctggccttgctgctccacgccgccaggccggacatccagatgacacagagccctagcagcctgtctgccagcgtgggagacagagtgaccatcacatgcaaggccagcgaccacatcaacaactggctggcctggtatcagcagaagcctggacaggcccctaagctgctgatctacggcgctaccacactggaaacaggcgtgcccagcagattttctggcagcggctctggcaccgactacaccctgacaatatccagcctccagcctgaggacttcgccacctactactgtcagcagagctggaacaccccttggacattcggccagggcaccaagctggaaatcaagagaggcggaggcggaagtggaggcggaggatctggcggcggaggctctcaagttcagcttcaacagcctggcgctgagctggtcaaacctggcgcttctgtgaagatgagctgcaaagccagcggctacgccttcagcagctactggatcaactggatgaagcagaaacccggccagggactcgaatggatcggccaaatctatcccggcgacggcgacaccaactacaacggcaagttcaagggcagagccacactgaccgccgatacctctagcagcacagcctacatgcagctgagcagcctgaccagcgaagatagcgccgtgtacttctgtgcccggtccatcacaacagtcgtgggctgcgctatggactattggggccagggaacaagcgtgaccgtgtctagtacgcgtaaaattgaagttatgtatcctcctccttacctagacaatgagaagagcaatggaaccattatccatgtgaaaggggcgcgtggaaacccttcaagtagttggccttcacccacagaaccaagctccaaatctggtaacctcagacacctgcacattctgattgggacctcagtggtcaaaatccctttcaccatcctcctcttctttctccttcatcgctggtgctccaacaaaaaaaaatgctgctgtaatggaccaagagcctgcagggaacagaag

SEQ ID NO: 8827 - DNA, 1434 bp, Artificial Sequence
  Synthetic Polynucleotide
atggccttaccagtgaccgccttgctcctgccgctggccttgctgctccacgccgccaggccggacatccagatgacacagagccctagcagcctgtctgccagcgtgggagacagagtgaccatcacatgcaaggccagcgaccacatcaacaactggctggcctggtatcagcagaagcctggacaggcccctaagctgctgatctacggcgctaccacactggaaacaggcgtgcccagcagattttctggcagcggctctggcaccgactacaccctgacaatatccagcctccagcctgaggacttcgccacctactactgtcagcagagctggaacaccccttggacattcggccagggcaccaagctggaaatcaagagaggcggaggcggaagtggaggcggaggatctggcggcggaggctctcaagttcagcttcaacagcctggcgctgagctggtcaaacctggcgcttctgtgaagatgagctgcaaagccagcggctacgccttcagcagctactggatcaactggatgaagcagaaacccggccagggactcgaatggatcggccaaatctatcccggcgacggcgacaccaactacaacggcaagttcaagggcagagccacactgaccgccgatacctctagcagcacagcctacatgcagctgagcagcctgaccagcgaagatagcgccgtgtacttctgtgcccggtccatcacaacagtcgtgggctgcgctatggactattggggccagggaacaagcgtgaccgtgtctagtacgcgtaaaattgaagttatgtatcctcctccttacctagacaatgagaagagcaatggaaccattatccatgtgaaaggggcgcgtcccttccggtttgaagatttggttactgatgaagagacagcttcagatgctctggagagaaactctctatcctctcaagacccacagcagcccaccagtactgtctcagtaacggaagattctagtacatcggagattgacaaggaagagaaagaacaaaccactcaagatcctgacttgaccaccgaagcaaatcctcagtatttaggactggcaagaaagaaaagtggcatcctgctgctcacgctggtgtccttcctcattttcatactcttcatcatagtccagctcttcatcatgaagctgaggaaagcacatgtgatatggaagaaagaaaacgaagtttcagaacacacactagaaagttacagatcaaggtcaaataatgaagaaacatcatctgaagagaaaaatggccaatcttcccaccctatgcgttgcatgaactacatcacaaagttgtactcagaagcaaaaacaaagaggaaggaaaatgtacaacattcaaaattagaagaaaagcacatccaagtaccagagagtattgtgtag

SEQ ID NO: 8828 - DNA, 1245 bp, Artificial Sequence
  Synthetic Polynucleotide
atggccttaccagtgaccgccttgctcctgccgctggccttgctgctccacgccgccaggccggacatccagatgacacagagccctagcagcctgtctgccagcgtgggagacagagtgaccatcacatgcaaggccagcgaccacatcaacaactggctggcctggtatcagcagaagcctggacaggcccctaagctgctgatctacggcgctaccacactggaaacaggcgtgcccagcagattttctggcagcggctctggcaccgactacaccctgacaatatccagcctccagcctgaggacttcgccacctactactgtcagcagagctggaacaccccttggacattcggccagggcaccaagctggaaatcaagagaggcggaggcggaagtggaggcggaggatctggcggcggaggctctcaagttcagcttcaacagcctggcgctgagctggtcaaacctggcgcttctgtgaagatgagctgcaaagccagcggctacgccttcagcagctactggatcaactggatgaagcagaaacccggccagggactcgaatggatcggccaaatctatcccggcgacggcgacaccaactacaacggcaagttcaagggcagagccacactgaccgccgatacctctagcagcacagcctacatgcagctgagcagcctgaccagcgaagatagcgccgtgtacttctgtgcccggtccatcacaacagtcgtgggctgcgctatggactattggggccagggaacaagcgtgaccgtgtctagtacgcgtaaaattgaagttatgtatcctcctccttacctagacaatgagaagagcaatggaaccattatccatgtgaaaggggcgcgtctggaggtcctagaaagctcagtggctgagcacggtgccaggttccagattccattgcttggagccatggccgcgacgctggtggtcatctgcacagcagtcatcgtggtggtcgcgttgactagaaagaagaaagccctcagaatccattctgtggaaggtgacctcaggagaaaatcagctggacaggaggaatggagccccagtgctccctcacccccaggaagctgtgtccaggcagaagctgcacctgctgggctctgtggagagcagcggggagaggactgtgccgagctgcatgactacttcaatgtcctgagttacagaagcctgggtaactgcagcttcttcacagagactggt

SEQ ID NO: 8829 - DNA, 1251 bp, Artificial Sequence
  Synthetic Polynucleotide
atggccttaccagtgaccgccttgctcctgccgctggccttgctgctccacgccgccaggccggacatccagatgacacagagccctagcagcctgtctgccagcgtgggagacagagtgaccatcacatgcaaggccagcgaccacatcaacaactggctggcctggtatcagcagaagcctggacaggcccctaagctgctgatctacggcgctaccacactggaaacaggcgtgcccagcagattttctggcagcggctctggcaccgactacaccctgacaatatccagcctccagcctgaggacttcgccacctactactgtcagcagagctggaacaccccttggacattcggccagggcaccaagctggaaatcaagagaggcggaggcggaagtggaggcggaggatctggcggcggaggctctcaagttcagcttcaacagcctggcgctgagctggtcaaacctggcgcttctgtgaagatgagctgcaaagccagcggctacgccttcagcagctactggatcaactggatgaagcagaaacccggccagggactcgaatggatcggccaaatctatcccggcgacggcgacaccaactacaacggcaagttcaagggcagagccacactgaccgccgatacctctagcagcacagcctacatgcagctgagcagcctgaccagcgaagatagcgccgtgtacttctgtgcccggtccatcacaacagtcgtgggctgcgctatggactattggggccagggaacaagcgtgaccgtgtctagtacgcgtaaaattgaagttatgtatcctcctccttacctagacaatgagaagagcaatggaaccattatccatgtgaaaggggcgcgtgcccagaagctttgcgaagatgttaaaattcaatatacagataccaaaatgattctgtttatggtttctgggatatgcatagtcttcggtttcatcatactgctgttacttgttttgaggaaaagaagagattccctatctttgtctactcagcgaacacagggccccgcagagtccgcaaggaacctagagtatgtttcagtgtctccaacgaacaacactgtgtatgcttcagtcactcattcaaacagggaaacagaaatctggacacctagagaaaatgatactatcacaatttactccacaattaatcattccaaagagagtaaacccactttttccagggcaactgcccttgacaatgtcgtg

SEQ ID NO: 8830 - DNA, 1269 bp, Artificial Sequence
  Synthetic Polynucleotide
atggccttaccagtgaccgccttgctcctgccgctggccttgctgctccacgccgccaggccggacatccagatgacacagagccctagcagcctgtctgccagcgtgggagacagagtgaccatcacatgcaaggccagcgaccacatcaacaactggctggcctggtatcagcagaagcctggacaggcccctaagctgctgatctacggcgctaccacactggaaacaggcgtgcccagcagattttctggcagcggctctggcaccgactacaccctgacaatatccagcctccagcctgaggacttcgccacctactactgtcagcagagctggaacaccccttggacattcggccagggcaccaagctggaaatcaagagaggcggaggcggaagtggaggcggaggatctggcggcggaggctctcaagttcagcttcaacagcctggcgctgagctggtcaaacctggcgcttctgtgaagatgagctgcaaagccagcggctacgccttcagcagctactggatcaactggatgaagcagaaacccggccagggactcgaatggatcggccaaatctatcccggcgacggcgacaccaactacaacggcaagttcaagggcagagccacactgaccgccgatacctctagcagcacagcctacatgcagctgagcagcctgaccagcgaagatagcgccgtgtacttctgtgcccggtccatcacaacagtcgtgggctgcgctatggactattggggccagggaacaagcgtgaccgtgtctagtacgcgtaaaattgaagttatgtatcctcctccttacctagacaatgagaagagcaatggaaccattatccatgtgaaaggggcgcgtagccccatccttgccaggaagctctgtgaaggtgctgctgatgacccagattcctccatggtcctcctgtgtctcctgttggtgcccctcctgctcagtctctttgtactggggctatttctttggtttctgaagagagagagacaagaagagtacattgaagagaagaagagagtggacatttgtcgggaaactcctaacatatgcccccattctggagagaacacagagtacgacacaatccctcacactaatagaacaatcctaaaggaagatccagcaaatacggtttactccactgtggaaataccgaaaaagatggaaaatccccactcactgctcacgatgccagacacaccaaggctatttgcctatgagaatgttatc

SEQ ID NO: 8831 - DNA, 1128 bp, Artificial Sequence
  Synthetic Polynucleotide
atggccttaccagtgaccgccttgctcctgccgctggccttgctgctccacgccgccaggccggacatccagatgacacagagccctagcagcctgtctgccagcgtgggagacagagtgaccatcacatgcaaggccagcgaccacatcaacaactggctggcctggtatcagcagaagcctggacaggcccctaagctgctgatctacggcgctaccacactggaaacaggcgtgcccagcagattttctggcagcggctctggcaccgactacaccctgacaatatccagcctccagcctgaggacttcgccacctactactgtcagcagagctggaacaccccttggacattcggccagggcaccaagctggaaatcaagagaggcggaggcggaagtggaggcggaggatctggcggcggaggctctcaagttcagcttcaacagcctggcgctgagctggtcaaacctggcgcttctgtgaagatgagctgcaaagccagcggctacgccttcagcagctactggatcaactggatgaagcagaaacccggccagggactcgaatggatcggccaaatctatcccggcgacggcgacaccaactacaacggcaagttcaagggcagagccacactgaccgccgatacctctagcagcacagcctacatgcagctgagcagcctgaccagcgaagatagcgccgtgtacttctgtgcccggtccatcacaacagtcgtgggctgcgctatggactattggggccagggaacaagcgtgaccgtgtctagtacgcgtaaaattgaagttatgtatcctcctccttacctagacaatgagaagagcaatggaaccattatccatgtgaaaggggcgcgtccaccccaaagatccctgtgcagctccgattttattcgcatccttgtgatcttctctggaatgttccttgttttcaccctggccggggccctgttcctccatcaacgaaggaaatatagatcaaacaaaggagaaagtcctgtggagcctgcagagccttgtcattacagctgccccagggaggaggagggcagcaccatccccatccaggaggattaccgaaaaccggagcctgcctgctccccc

SEQ ID NO: 8832 - DNA, 1395 bp, Artificial Sequence
  Synthetic Polynucleotide
atggccttaccagtgaccgccttgctcctgccgctggccttgctgctccacgccgccaggccggacatccagatgacacagagccctagcagcctgtctgccagcgtgggagacagagtgaccatcacatgcaaggccagcgaccacatcaacaactggctggcctggtatcagcagaagcctggacaggcccctaagctgctgatctacggcgctaccacactggaaacaggcgtgcccagcagattttctggcagcggctctggcaccgactacaccctgacaatatccagcctccagcctgaggacttcgccacctactactgtcagcagagctggaacaccccttggacattcggccagggcaccaagctggaaatcaagagaggcggaggcggaagtggaggcggaggatctggcggcggaggctctcaagttcagcttcaacagcctggcgctgagctggtcaaacctggcgcttctgtgaagatgagctgcaaagccagcggctacgccttcagcagctactggatcaactggatgaagcagaaacccggccagggactcgaatggatcggccaaatctatcccggcgacggcgacaccaactacaacggcaagttcaagggcagagccacactgaccgccgatacctctagcagcacagcctacatgcagctgagcagcctgaccagcgaagatagcgccgtgtacttctgtgcccggtccatcacaacagtcgtgggctgcgctatggactattggggccagggaacaagcgtgaccgtgtctagtacgcgtaaaattgaagttatgtatcctcctccttacctagacaatgagaagagcaatggaaccattatccatgtgaaaggggcgcgtctgctggtgaaagaaagctctggaggcccggactccccggacacagagcccggctcctcagctggacccacgcagaggccgtcggacaacagtcacaatgagcatgcacctgcttcccaaggcctgaaagctgagcatctgtatattctcatcggggtctcagtggtcttcctcttctgtctcctcctcctggtcctcttctgcctccatcgccagaatcagataaagcaggggccccccagaagcaaggacgaggagcagaagccacagcagaggcctgacctggctgttgatgttctagagaggacagcagacaaggccacagtcaatggacttcctgagaaggacagagagacggacacctcggccctggctgcagggagttcccaggaggtgacgtatgctcagctggaccactgggccctcacacagaggacagcccgggctgtgtccccacagtccacaaagcccatggccgagtccatcacgtatgcagccgttgccagacactga

SEQ ID NO: 8833 - DNA, 1614 bp, Artificial Sequence
  Synthetic Polynucleotide
atggccttaccagtgaccgccttgctcctgccgctggccttgctgctccacgccgccaggccggacatccagatgacacagagccctagcagcctgtctgccagcgtgggagacagagtgaccatcacatgcaaggccagcgaccacatcaacaactggctggcctggtatcagcagaagcctggacaggcccctaagctgctgatctacggcgctaccacactggaaacaggcgtgcccagcagattttctggcagcggctctggcaccgactacaccctgacaatatccagcctccagcctgaggacttcgccacctactactgtcagcagagctggaacaccccttggacattcggccagggcaccaagctggaaatcaagagaggcggaggcggaagtggaggcggaggatctggcggcggaggctctcaagttcagcttcaacagcctggcgctgagctggtcaaacctggcgcttctgtgaagatgagctgcaaagccagcggctacgccttcagcagctactggatcaactggatgaagcagaaacccggccagggactcgaatggatcggccaaatctatcccggcgacggcgacaccaactacaacggcaagttcaagggcagagccacactgaccgccgatacctctagcagcacagcctacatgcagctgagcagcctgaccagcgaagatagcgccgtgtacttctgtgcccggtccatcacaacagtcgtgggctgcgctatggactattggggccagggaacaagcgtgaccgtgtctagtacgcgtaaaattgaagttatgtatcctcctccttacctagacaatgagaagagcaatggaaccattatccatgtgaaaggggcgcgtcaccccagtgaccccctggagctcgtggtctcaggaccgtctgggggccccagctccccgacaacaggccccacctccacatctgcaggccctgaggaccagcccctcacccccaccgggtcggatccccagagtggtctgggaaggcacctgggggttgtgatcggcatcttggtggccgtcatcctactgctcctcctcctcctcctcctcttcctcatcctccgacatcgacgtcagggcaaacactggacatcgacccagagaaaggctgatttccaacatcctgcaggggctgtggggccagagcccacagacagaggcctgcagtggaggtccagcccagctgccgatgcccaggaagaaaacctctatgctgccgtgaagcacacacagcctgaggatggggtggagatggacactcggcagagcccacacgatgaagacccccaggcagtgacgtatgccgaggtgaaacactccagacctaggagagaaatggcctctcctccttccccactgtctggggaattcctggacacaaaggacagacaggcggaagaggacaggcagatggacactgaggctgctgcatctgaagccccccaggatgtgacctacgcccagctgcacagcttgaccctcagacgggaggcaactgagcctcctccatcccaggaagggccctctccagctgtgcccagcatctacgccactctggccatccactag

SEQ ID NO: 8834 - DNA, 1173 bp, Artificial Sequence
  Synthetic Polynucleotide
atggccttaccagtgaccgccttgctcctgccgctggccttgctgctccacgccgccaggccggacatccagatgacacagagccctagcagcctgtctgccagcgtgggagacagagtgaccatcacatgcaaggccagcgaccacatcaacaactggctggcctggtatcagcagaagcctggacaggcccctaagctgctgatctacggcgctaccacactggaaacaggcgtgcccagcagattttctggcagcggctctggcaccgactacaccctgacaatatccagcctccagcctgaggacttcgccacctactactgtcagcagagctggaacaccccttggacattcggccagggcaccaagctggaaatcaagagaggcggaggcggaagtggaggcggaggatctggcggcggaggctctcaagttcagcttcaacagcctggcgctgagctggtcaaacctggcgcttctgtgaagatgagctgcaaagccagcggctacgccttcagcagctactggatcaactggatgaagcagaaacccggccagggactcgaatggatcggccaaatctatcccggcgacggcgacaccaactacaacggcaagttcaagggcagagccacactgaccgccgatacctctagcagcacagcctacatgcagctgagcagcctgaccagcgaagatagcgccgtgtacttctgtgcccggtccatcacaacagtcgtgggctgcgctatggactattggggccagggaacaagcgtgaccgtgtctagtacgcgtaaaattgaagttatgtatcctcctccttacctagacaatgagaagagcaatggaaccattatccatgtgaaaggggcgcgtggcccaagtcctgctgatcttagcccaggcgcttcctctgtgactcctccagctcctgcacgcgaacctggacactctccccagatcatctcattttttctcgctctcacatcaaccgctttgctgttcctgctcttttttctcaccctccggttctccgtggttaagagaggccggaaaaaactcctctatatctttaaacagccctttatgcgcccggtccaaacaacccaagaggaagatggctgctcttgcagattcccggaagaggaagaaggcggctgcgagctg

SEQ ID NO: 8835 - DNA, 1206 bp, Artificial Sequence
  Synthetic Polynucleotide
atggccttaccagtgaccgccttgctcctgccgctggccttgctgctccacgccgccaggccggacatccagatgacacagagccctagcagcctgtctgccagcgtgggagacagagtgaccatcacatgcaaggccagcgaccacatcaacaactggctggcctggtatcagcagaagcctggacaggcccctaagctgctgatctacggcgctaccacactggaaacaggcgtgcccagcagattttctggcagcggctctggcaccgactacaccctgacaatatccagcctccagcctgaggacttcgccacctactactgtcagcagagctggaacaccccttggacattcggccagggcaccaagctggaaatcaagagaggcggaggcggaagtggaggcggaggatctggcggcggaggctctcaagttcagcttcaacagcctggcgctgagctggtcaaacctggcgcttctgtgaagatgagctgcaaagccagcggctacgccttcagcagctactggatcaactggatgaagcagaaacccggccagggactcgaatggatcggccaaatctatcccggcgacggcgacaccaactacaacggcaagttcaagggcagagccacactgaccgccgatacctctagcagcacagcctacatgcagctgagcagcctgaccagcgaagatagcgccgtgtacttctgtgcccggtccatcacaacagtcgtgggctgcgctatggactattggggccagggaacaagcgtgaccgtgtctagtacgcgtaaaattgaagttatgtatcctcctccttacctagacaatgagaagagcaatggaaccattatccatgtgaaaggggcgcgtaaaattgaagtcatgtatcctccgccgtacctcgataacgagaaaagcaatgggacgatcattcacgtcaagggaaaacatctctgccccagtcctctgttccctgggccttccaaaccattttgggttctcgtcgtcgtcggcggagtcctggcttgttattctctgcttgtgacagtcgcctttatcatattctgggtccgctccaagagaagcagactgctccactccgattatatgaatatgacacccaggcggccagggcctacacggaaacactatcaaccctacgctccacctcgggatttcgctgcctacagatca

SEQ ID NO: 8836 - DNA, 1215 bp, Artificial Sequence
  Synthetic Polynucleotide
atggccttaccagtgaccgccttgctcctgccgctggccttgctgctccacgccgccaggccggacatccagatgacacagagccctagcagcctgtctgccagcgtgggagacagagtgaccatcacatgcaaggccagcgaccacatcaacaactggctggcctggtatcagcagaagcctggacaggcccctaagctgctgatctacggcgctaccacactggaaacaggcgtgcccagcagattttctggcagcggctctggcaccgactacaccctgacaatatccagcctccagcctgaggacttcgccacctactactgtcagcagagctggaacaccccttggacattcggccagggcaccaagctggaaatcaagagaggcggaggcggaagtggaggcggaggatctggcggcggaggctctcaagttcagcttcaacagcctggcgctgagctggtcaaacctggcgcttctgtgaagatgagctgcaaagccagcggctacgccttcagcagctactggatcaactggatgaagcagaaacccggccagggactcgaatggatcggccaaatctatcccggcgacggcgacaccaactacaacggcaagttcaagggcagagccacactgaccgccgatacctctagcagcacagcctacatgcagctgagcagcctgaccagcgaagatagcgccgtgtacttctgtgcccggtccatcacaacagtcgtgggctgcgctatggactattggggccagggaacaagcgtgaccgtgtctagtacgcgtaaaattgaagttatgtatcctcctccttacctagacaatgagaagagcaatggaaccattatccatgtgaaaggggcgcgtgaagatcgggacccaccagccactcagcctcaagaaactcaggggcctcctgctaggcccattacagtgcaacctaccgaggcttggccccggacatctcagggaccttctacaaggccagtggaagtgccaggcggtagagctgtggctgctatccttggattgggcctcgttctcggactgttgggaccacttgcaatcctgctggctctctatctgctgcggcgggatcagagactccctccagatgctcataagccacctggcggcggatctttcaggaccccaattcaagaagaacaagccgacgctcactctaccctggctaagatc

SEQ ID NO: 8837 - DNA, 1347 bp, Artificial Sequence
  Synthetic Polynucleotide
atggccttaccagtgaccgccttgctcctgccgctggccttgctgctccacgccgccaggccggacatccagatgacacagagccctagcagcctgtctgccagcgtgggagacagagtgaccatcacatgcaaggccagcgaccacatcaacaactggctggcctggtatcagcagaagcctggacaggcccctaagctgctgatctacggcgctaccacactggaaacaggcgtgcccagcagattttctggcagcggctctggcaccgactacaccctgacaatatccagcctccagcctgaggacttcgccacctactactgtcagcagagctggaacaccccttggacattcggccagggcaccaagctggaaatcaagagaggcggaggcggaagtggaggcggaggatctggcggcggaggctctcaagttcagcttcaacagcctggcgctgagctggtcaaacctggcgcttctgtgaagatgagctgcaaagccagcggctacgccttcagcagctactggatcaactggatgaagcagaaacccggccagggactcgaatggatcggccaaatctatcccggcgacggcgacaccaactacaacggcaagttcaagggcagagccacactgaccgccgatacctctagcagcacagcctacatgcagctgagcagcctgaccagcgaagatagcgccgtgtacttctgtgcccggtccatcacaacagtcgtgggctgcgctatggactattggggccagggaacaagcgtgaccgtgtctagtacgcgtaaaattgaagttatgtatcctcctccttacctagacaatgagaagagcaatggaaccattatccatgtgaaaggggcgcgtcaggattgtcaaaatgcacatcaagagttccggttttggccgtttcttgtgattatcgtgattctgtctgccctcttcctcggaactctggcttgcttctgtgtctggcggcgcaaacggaaagagaaacagtctgagacttccccgaaagagtttctcacgatatacgaagatgtcaaggacctcaagacccgccgcaaccatgagcaagaacagacattcccaggcggaggctccacaatctactccatgattcagtcccagtctagcgccccaacctctcaagagcctgcttataccctgtacagtctgattcagccctccagaaagtccggctctcggaagaggaaccactctcctagcttcaactccaccatatatgaagtcattggcaagtctcagcccaaagcacagaatcctgccaggctgagcagaaaagaacttgagaatttcgacgtctactcc

SEQ ID NO: 8838 - DNA, 1173 bp, Artificial Sequence
  Synthetic Polynucleotide
atggccttaccagtgaccgccttgctcctgccgctggccttgctgctccacgccgccaggccggacatccagatgacacagagccctagcagcctgtctgccagcgtgggagacagagtgaccatcacatgcaaggccagcgaccacatcaacaactggctggcctggtatcagcagaagcctggacaggcccctaagctgctgatctacggcgctaccacactggaaacaggcgtgcccagcagattttctggcagcggctctggcaccgactacaccctgacaatatccagcctccagcctgaggacttcgccacctactactgtcagcagagctggaacaccccttggacattcggccagggcaccaagctggaaatcaagagaggcggaggcggaagtggaggcggaggatctggcggcggaggctctcaagttcagcttcaacagcctggcgctgagctggtcaaacctggcgcttctgtgaagatgagctgcaaagccagcggctacgccttcagcagctactggatcaactggatgaagcagaaacccggccagggactcgaatggatcggccaaatctatcccggcgacggcgacaccaactacaacggcaagttcaagggcagagccacactgaccgccgatacctctagcagcacagcctacatgcagctgagcagcctgaccagcgaagatagcgccgtgtacttctgtgcccggtccatcacaacagtcgtgggctgcgctatggactattggggccagggaacaagcgtgaccgtgtctagtacgcgtaaaattgaagttatgtatcctcctccttacctagacaatgagaagagcaatggaaccattatccatgtgaaaggggcgcgtgttcaggctcccagcagctccccaatgggcattattgtggccgtcgtgaccggaattgctgtggccgcaatcgtggcagctgtcgtcgctctgatctattgcagaaagaagcggatcagcgccctgccagggtatcctgagtgccgcgaaatgggcgaaactctgcctgagaaacctgctaaccccacaaatcccgatgaagctgacaaagtcggcgctgaaaacacgatcacatactccctgctcatgcatcctgacgctcttgaggaacctgacgatcagaaccggatc

SEQ ID NO: 8839 - DNA, 1173 bp, Artificial Sequence
  Synthetic Polynucleotide
atggccttaccagtgaccgccttgctcctgccgctggccttgctgctccacgccgccaggccggacatccagatgacacagagccctagcagcctgtctgccagcgtgggagacagagtgaccatcacatgcaaggccagcgaccacatcaacaactggctggcctggtatcagcagaagcctggacaggcccctaagctgctgatctacggcgctaccacactggaaacaggcgtgcccagcagattttctggcagcggctctggcaccgactacaccctgacaatatccagcctccagcctgaggacttcgccacctactactgtcagcagagctggaacaccccttggacattcggccagggcaccaagctggaaatcaagagaggcggaggcggaagtggaggcggaggatctggcggcggaggctctcaagttcagcttcaacagcctggcgctgagctggtcaaacctggcgcttctgtgaagatgagctgcaaagccagcggctacgccttcagcagctactggatcaactggatgaagcagaaacccggccagggactcgaatggatcggccaaatctatcccggcgacggcgacaccaactacaacggcaagttcaagggcagagccacactgaccgccgatacctctagcagcacagcctacatgcagctgagcagcctgaccagcgaagatagcgccgtgtacttctgtgcccggtccatcacaacagtcgtgggctgcgctatggactattggggccagggaacaagcgtgaccgtgtctagtacgcgtaaaattgaagttatgtatcctcctccttacctagacaatgagaagagcaatggaaccattatccatgtgaaaggggcgcgtctgcaagtcctgggccttcagctgccaactccagtgtggtttcatgtcctgttctatctggctgtggggattatgttccttgtgaataccgtgctctgggttaccattcggaaagaactcaagcgcaagaaaaaatgggatcttgagataagcctggacagcgggcatgagaagaaagtcatcagttcccttcaagaggacagacatctcgaagaggaactcaaatgtcaagaacaaaaagaagaacaactccaagagggtgtccatcggaaagagccacagggcgctaca

SEQ ID NO: 8840 - DNA, 1311 bp, Artificial Sequence
  Synthetic Polynucleotide
atggccttaccagtgaccgccttgctcctgccgctggccttgctgctccacgccgccaggccggacatccagatgacacagagccctagcagcctgtctgccagcgtgggagacagagtgaccatcacatgcaaggccagcgaccacatcaacaactggctggcctggtatcagcagaagcctggacaggcccctaagctgctgatctacggcgctaccacactggaaacaggcgtgcccagcagattttctggcagcggctctggcaccgactacaccctgacaatatccagcctccagcctgaggacttcgccacctactactgtcagcagagctggaacaccccttggacattcggccagggcaccaagctggaaatcaagagaggcggaggcggaagtggaggcggaggatctggcggcggaggctctcaagttcagcttcaacagcctggcgctgagctggtcaaacctggcgcttctgtgaagatgagctgcaaagccagcggctacgccttcagcagctactggatcaactggatgaagcagaaacccggccagggactcgaatggatcggccaaatctatcccggcgacggcgacaccaactacaacggcaagttcaagggcagagccacactgaccgccgatacctctagcagcacagcctacatgcagctgagcagcctgaccagcgaagatagcgccgtgtacttctgtgcccggtccatcacaacagtcgtgggctgcgctatggactattggggccagggaacaagcgtgaccgtgtctagtacgcgtaaaattgaagttatgtatcctcctccttacctagacaatgagaagagcaatggaaccattatccatgtgaaaggggcgcgtcagagcttcggcctgctggaccccaagctgtgctacctgctggatggcatcctgttcatctacggcgtgatcctgaccgccctgttcctgagagtgaagttcagcagaagcgccgacgcccctgcctaccagcagggacagaaccaactgtacaacgagctgaacctgggcagacgggaagagtacgacgtgctggacaagcggagaggcagggaccctgagatgggcggaaagccccagcggagaaagaacccccaggaaggactgtataacgaactccagaaagacaagatggccgaagcctacagcgagatcggcatgaagggcgagcggagaagaggcaagggccacgatggcctgtaccagggcctgagcaccgccaccaaggacacctatgacgccctgcacatgcaggccctgcctccaaga

SEQ ID NO: 8841 - DNA, 1437 bp, Artificial Sequence
  Synthetic Polynucleotide
atggccttaccagtgaccgccttgctcctgccgctggccttgctgctccacgccgccaggccggacatccagatgacacagagccctagcagcctgtctgccagcgtgggagacagagtgaccatcacatgcaaggccagcgaccacatcaacaactggctggcctggtatcagcagaagcctggacaggcccctaagctgctgatctacggcgctaccacactggaaacaggcgtgcccagcagattttctggcagcggctctggcaccgactacaccctgacaatatccagcctccagcctgaggacttcgccacctactactgtcagcagagctggaacaccccttggacattcggccagggcaccaagctggaaatcaagagaggcggaggcggaagtggaggcggaggatctggcggcggaggctctcaagttcagcttcaacagcctggcgctgagctggtcaaacctggcgcttctgtgaagatgagctgcaaagccagcggctacgccttcagcagctactggatcaactggatgaagcagaaacccggccagggactcgaatggatcggccaaatctatcccggcgacggcgacaccaactacaacggcaagttcaagggcagagccacactgaccgccgatacctctagcagcacagcctacatgcagctgagcagcctgaccagcgaagatagcgccgtgtacttctgtgcccggtccatcacaacagtcgtgggctgcgctatggactattggggccagggaacaagcgtgaccgtgtctagtacgcgtaaaattgaagttatgtatcctcctccttacctagacaatgagaagagcaatggaaccattatccatgtgaaaggggcgcgtcagagcttcggcctgctggaccccaagctgtgctacctgctggatggcatcctgttcatctacggcgtgatcctgaccgccctgttcctgaaacggggcagaaagaaactcctgtatatattcaaacaaccatttatgagaccagtacaaactactcaagaggaagatggctgtagctgccgatttccagaagaagaagaaggaggatgtgaactgagagtgaagttcagcagaagcgccgacgcccctgcctaccagcagggacagaaccaactgtacaacgagctgaacctgggcagacgggaagagtacgacgtgctggacaagcggagaggcagggaccctgagatgggcggaaagccccagcggagaaagaacccccaggaaggactgtataacgaactccagaaagacaagatggccgaagcctacagcgagatcggcatgaagggcgagcggagaagaggcaagggccacgatggcctgtaccagggcctgagcaccgccaccaaggacacctatgacgccctgcacatgcaggccctgcctccaaga

SEQ ID NO: 8842 - DNA, 1434 bp, Artificial Sequence
  Synthetic Polynucleotide
atggccttaccagtgaccgccttgctcctgccgctggccttgctgctccacgccgccaggccggacatccagatgacacagagccctagcagcctgtctgccagcgtgggagacagagtgaccatcacatgcaaggccagcgaccacatcaacaactggctggcctggtatcagcagaagcctggacaggcccctaagctgctgatctacggcgctaccacactggaaacaggcgtgcccagcagattttctggcagcggctctggcaccgactacaccctgacaatatccagcctccagcctgaggacttcgccacctactactgtcagcagagctggaacaccccttggacattcggccagggcaccaagctggaaatcaagagaggcggaggcggaagtggaggcggaggatctggcggcggaggctctcaagttcagcttcaacagcctggcgctgagctggtcaaacctggcgcttctgtgaagatgagctgcaaagccagcggctacgccttcagcagctactggatcaactggatgaagcagaaacccggccagggactcgaatggatcggccaaatctatcccggcgacggcgacaccaactacaacggcaagttcaagggcagagccacactgaccgccgatacctctagcagcacagcctacatgcagctgagcagcctgaccagcgaagatagcgccgtgtacttctgtgcccggtccatcacaacagtcgtgggctgcgctatggactattggggccagggaacaagcgtgaccgtgtctagtacgcgtaaaattgaagttatgtatcctcctccttacctagacaatgagaagagcaatggaaccattatccatgtgaaaggggcgcgtcagagcttcggcctgctggaccccaagctgtgctacctgctggatggcatcctgttcatctacggcgtgatcctgaccgccctgttcctgaggagtaagaggagcaggctcctgcacagtgactacatgaacatgactccacgccgccccggacccacccgcaagcattaccagccctatgccccaccacgcgacttcgcagcctatcgctccagagtgaagttcagcagaagcgccgacgcccctgcctaccagcagggacagaaccaactgtacaacgagctgaacctgggcagacgggaagagtacgacgtgctggacaagcggagaggcagggaccctgagatgggcggaaagccccagcggagaaagaacccccaggaaggactgtataacgaactccagaaagacaagatggccgaagcctacagcgagatcggcatgaagggcgagcggagaagaggcaagggccacgatggcctgtaccagggcctgagcaccgccaccaaggacacctatgacgccctgcacatgcaggccctgcctccaaga

SEQ ID NO: 8843 - DNA, 1419 bp, Artificial Sequence
  Synthetic Polynucleotide
atggccttaccagtgaccgccttgctcctgccgctggccttgctgctccacgccgccaggccggacatccagatgacacagagccctagcagcctgtctgccagcgtgggagacagagtgaccatcacatgcaaggccagcgaccacatcaacaactggctggcctggtatcagcagaagcctggacaggcccctaagctgctgatctacggcgctaccacactggaaacaggcgtgcccagcagattttctggcagcggctctggcaccgactacaccctgacaatatccagcctccagcctgaggacttcgccacctactactgtcagcagagctggaacaccccttggacattcggccagggcaccaagctggaaatcaagagaggcggaggcggaagtggaggcggaggatctggcggcggaggctctcaagttcagcttcaacagcctggcgctgagctggtcaaacctggcgcttctgtgaagatgagctgcaaagccagcggctacgccttcagcagctactggatcaactggatgaagcagaaacccggccagggactcgaatggatcggccaaatctatcccggcgacggcgacaccaactacaacggcaagttcaagggcagagccacactgaccgccgatacctctagcagcacagcctacatgcagctgagcagcctgaccagcgaagatagcgccgtgtacttctgtgcccggtccatcacaacagtcgtgggctgcgctatggactattggggccagggaacaagcgtgaccgtgtctagtacgcgtaaaattgaagttatgtatcctcctccttacctagacaatgagaagagcaatggaaccattatccatgtgaaaggggcgcgtcagagcttcggcctgctggaccccaagctgtgctacctgctggatggcatcctgttcatctacggcgtgatcctgaccgccctgttcctgagggaccaaagactgcctcctgacgctcacaaacctccaggcggaggcagcttcagaacccctatccaagaggaacaggctgacgcccacagcaccctggcaaaaattagagtgaagttcagcagaagcgccgacgcccctgcctaccagcagggacagaaccaactgtacaacgagctgaacctgggcagacgggaagagtacgacgtgctggacaagcggagaggcagggaccctgagatgggcggaaagccccagcggagaaagaacccccaggaaggactgtataacgaactccagaaagacaagatggccgaagcctacagcgagatcggcatgaagggcgagcggagaagaggcaagggccacgatggcctgtaccagggcctgagcaccgccaccaaggacacctatgacgccctgcacatgcaggccctgcctccaaga

SEQ ID NO: 8844 - DNA, 1671 bp, Artificial Sequence
  Synthetic Polynucleotide
atggccttaccagtgaccgccttgctcctgccgctggccttgctgctccacgccgccaggccggacatccagatgacacagagccctagcagcctgtctgccagcgtgggagacagagtgaccatcacatgcaaggccagcgaccacatcaacaactggctggcctggtatcagcagaagcctggacaggcccctaagctgctgatctacggcgctaccacactggaaacaggcgtgcccagcagattttctggcagcggctctggcaccgactacaccctgacaatatccagcctccagcctgaggacttcgccacctactactgtcagcagagctggaacaccccttggacattcggccagggcaccaagctggaaatcaagagaggcggaggcggaagtggaggcggaggatctggcggcggaggctctcaagttcagcttcaacagcctggcgctgagctggtcaaacctggcgcttctgtgaagatgagctgcaaagccagcggctacgccttcagcagctactggatcaactggatgaagcagaaacccggccagggactcgaatggatcggccaaatctatcccggcgacggcgacaccaactacaacggcaagttcaagggcagagccacactgaccgccgatacctctagcagcacagcctacatgcagctgagcagcctgaccagcgaagatagcgccgtgtacttctgtgcccggtccatcacaacagtcgtgggctgcgctatggactattggggccagggaacaagcgtgaccgtgtctagtacgcgtaaaattgaagttatgtatcctcctccttacctagacaatgagaagagcaatggaaccattatccatgtgaaaggggcgcgtcagagcttcggcctgctggaccccaagctgtgctacctgctggatggcatcctgttcatctacggcgtgatcctgaccgccctgttcctgtggcggcggaagcggaaagagaagcagtctgagacaagccccaaagagttcctgaccatctacgaggacgtgaaggacctgaaaacccggcggaaccacgaacaagagcagacctttcctggcggaggcagcaccatctacagcatgatccagagccagagcagcgcccctacaagccaagagcctgcctacacactgtactccctgatccagcctagcagaaagagcggcagccggaagagaaatcacagccccagcttcaacagcacgatctacgaagtgatcggcaagagccagccaaaggctcagaaccctgccagactgagccggaaagagctggaaaacttcgacgtgtacagcagagtgaagttcagcagaagcgccgacgcccctgcctaccagcagggacagaaccaactgtacaacgagctgaacctgggcagacgggaagagtacgacgtgctggacaagcggagaggcagggaccctgagatgggcggaaagccccagcggagaaagaacccccaggaaggactgtataacgaactccagaaagacaagatggccgaagcctacagcgagatcggcatgaagggcgagcggagaagaggcaagggccacgatggcctgtaccagggcctgagcaccgccaccaaggacacctatgacgccctgcacatgcaggccctgcctccaaga

SEQ ID NO: 8845 - DNA, 1311 bp, Artificial Sequence
  Synthetic Polynucleotide
atggccttaccagtgaccgccttgctcctgccgctggccttgctgctccacgccgccaggccggacatccagatgacacagagccctagcagcctgtctgccagcgtgggagacagagtgaccatcacatgcaaggccagcgaccacatcaacaactggctggcctggtatcagcagaagcctggacaggcccctaagctgctgatctacggcgctaccacactggaaacaggcgtgcccagcagattttctggcagcggctctggcaccgactacaccctgacaatatccagcctccagcctgaggacttcgccacctactactgtcagcagagctggaacaccccttggacattcggccagggcaccaagctggaaatcaagagaggcggaggcggaagtggaggcggaggatctggcggcggaggctctcaagttcagcttcaacagcctggcgctgagctggtcaaacctggcgcttctgtgaagatgagctgcaaagccagcggctacgccttcagcagctactggatcaactggatgaagcagaaacccggccagggactcgaatggatcggccaaatctatcccggcgacggcgacaccaactacaacggcaagttcaagggcagagccacactgaccgccgatacctctagcagcacagcctacatgcagctgagcagcctgaccagcgaagatagcgccgtgtacttctgtgcccggtccatcacaacagtcgtgggctgcgctatggactattggggccagggaacaagcgtgaccgtgtctagtacgcgtaaaattgaagttatgtatcctcctccttacctagacaatgagaagagcaatggaaccattatccatgtgaaaggggcgcgtcagagcttcggcctgctggaccccaagctgagctacctgctggatggcatcctgttcatctacggcgtgatcctgaccgccctgttcctgagagtgaagttcagcagaagcgccgacgcccctgcctaccagcagggacagaaccaactgtacaacgagctgaacctgggcagacgggaagagtacgacgtgctggacaagcggagaggcagggaccctgagatgggcggaaagccccagcggagaaagaacccccaggaaggactgtataacgaactccagaaagacaagatggccgaagcctacagcgagatcggcatgaagggcgagcggagaagaggcaagggccacgatggcctgtaccagggcctgagcaccgccaccaaggacacctatgacgccctgcacatgcaggccctgcctccaaga

SEQ ID NO: 8846 - DNA, 1311 bp, Artificial Sequence
  Synthetic Polynucleotide
atggccttaccagtgaccgccttgctcctgccgctggccttgctgctccacgccgccaggccggacatccagatgacacagagccctagcagcctgtctgccagcgtgggagacagagtgaccatcacatgcaaggccagcgaccacatcaacaactggctggcctggtatcagcagaagcctggacaggcccctaagctgctgatctacggcgctaccacactggaaacaggcgtgcccagcagattttctggcagcggctctggcaccgactacaccctgacaatatccagcctccagcctgaggacttcgccacctactactgtcagcagagctggaacaccccttggacattcggccagggcaccaagctggaaatcaagagaggcggaggcggaagtggaggcggaggatctggcggcggaggctctcaagttcagcttcaacagcctggcgctgagctggtcaaacctggcgcttctgtgaagatgagctgcaaagccagcggctacgccttcagcagctactggatcaactggatgaagcagaaacccggccagggactcgaatggatcggccaaatctatcccggcgacggcgacaccaactacaacggcaagttcaagggcagagccacactgaccgccgatacctctagcagcacagcctacatgcagctgagcagcctgaccagcgaagatagcgccgtgtacttctgtgcccggtccatcacaacagtcgtgggctgcgctatggactattggggccagggaacaagcgtgaccgtgtctagtacgcgtaaaattgaagttatgtatcctcctccttacctagacaatgagaagagcaatggaaccattatccatgtgaaaggggcgcgtcagagcttcggcctgctggaccccaagctgtgctacctgctggatggcatcctgttcatctacggcgtgatcctgaccgccctgttcctgagagtgaagttcagcagaagcgccgacgcccctgcctaccagcagggacagaaccaactgtacaacgagctgaacctgggcagacgggaagagtacgacgtgctggacaagcggagaggcagggaccctgagatgggcggaaagccccagcggagaaagaacccccaggaaggactgttcaacgaactccagaaagacaagatggccgaagccttcagcgagatcggcatgaagggcgagcggagaagaggcaagggccacgatggcctgttccagggcctgagcaccgccaccaaggacaccttcgacgccctgcacatgcaggccctgcctccaaga

SEQ ID NO: 8847 - DNA, 1104 bp, Artificial Sequence
  Synthetic Polynucleotide
atggccttaccagtgaccgccttgctcctgccgctggccttgctgctccacgccgccaggccggacatccagatgacacagagccctagcagcctgtctgccagcgtgggagacagagtgaccatcacatgcaaggccagcgaccacatcaacaactggctggcctggtatcagcagaagcctggacaggcccctaagctgctgatctacggcgctaccacactggaaacaggcgtgcccagcagattttctggcagcggctctggcaccgactacaccctgacaatatccagcctccagcctgaggacttcgccacctactactgtcagcagagctggaacaccccttggacattcggccagggcaccaagctggaaatcaagagaggcggaggcggaagtggaggcggaggatctggcggcggaggctctcaagttcagcttcaacagcctggcgctgagctggtcaaacctggcgcttctgtgaagatgagctgcaaagccagcggctacgccttcagcagctactggatcaactggatgaagcagaaacccggccagggactcgaatggatcggccaaatctatcccggcgacggcgacaccaactacaacggcaagttcaagggcagagccacactgaccgccgatacctctagcagcacagcctacatgcagctgagcagcctgaccagcgaagatagcgccgtgtacttctgtgcccggtccatcacaacagtcgtgggctgcgctatggactattggggccagggaacaagcgtgaccgtgtctagtacgcgtaaaattgaagttatgtatcctcctccttacctagacaatgagaagagcaatggaaccattatccatgtgaaaggggcgcgtacaacacctggcgagagaagtagcctgcctgccttctatcctggcaccagcggctcttgttctggctgtggatctctgagcctgcctctgctggctggactggttgctgctgatgctgtggcctctctgctgattgtgggagccgtgttcctgtgcgccagacctagaagaagccccgctcaagaggacggcaaggtgtacatcaacatgcccggcagagga

SEQ ID NO: 8848 - DNA, 1230 bp, Artificial Sequence
  Synthetic Polynucleotide
atggccttaccagtgaccgccttgctcctgccgctggccttgctgctccacgccgccaggccggacatccagatgacacagagccctagcagcctgtctgccagcgtgggagacagagtgaccatcacatgcaaggccagcgaccacatcaacaactggctggcctggtatcagcagaagcctggacaggcccctaagctgctgatctacggcgctaccacactggaaacaggcgtgcccagcagattttctggcagcggctctggcaccgactacaccctgacaatatccagcctccagcctgaggacttcgccacctactactgtcagcagagctggaacaccccttggacattcggccagggcaccaagctggaaatcaagagaggcggaggcggaagtggaggcggaggatctggcggcggaggctctcaagttcagcttcaacagcctggcgctgagctggtcaaacctggcgcttctgtgaagatgagctgcaaagccagcggctacgccttcagcagctactggatcaactggatgaagcagaaacccggccagggactcgaatggatcggccaaatctatcccggcgacggcgacaccaactacaacggcaagttcaagggcagagccacactgaccgccgatacctctagcagcacagcctacatgcagctgagcagcctgaccagcgaagatagcgccgtgtacttctgtgcccggtccatcacaacagtcgtgggctgcgctatggactattggggccagggaacaagcgtgaccgtgtctagtacgcgtaaaattgaagttatgtatcctcctccttacctagacaatgagaagagcaatggaaccattatccatgtgaaaggggcgcgtacaacacctggcgagagaagtagcctgcctgccttctatcctggcaccagcggctcttgttctggctgtggatctctgagcctgcctctgctggctggactggttgctgctgatgctgtggcctctctgctgattgtgggagccgtgttcaaacggggcagaaagaaactcctgtatatattcaaacaaccatttatgagaccagtacaaactactcaagaggaagatggctgtagctgccgatttccagaagaagaagaaggaggatgtgaactgctgtgcgccagacctagaagaagccccgctcaagaggacggcaaggtgtacatcaacatgcccggcagagga

SEQ ID NO: 8849 - DNA, 1227 bp, Artificial Sequence
  Synthetic Polynucleotide
atggccttaccagtgaccgccttgctcctgccgctggccttgctgctccacgccgccaggccggacatccagatgacacagagccctagcagcctgtctgccagcgtgggagacagagtgaccatcacatgcaaggccagcgaccacatcaacaactggctggcctggtatcagcagaagcctggacaggcccctaagctgctgatctacggcgctaccacactggaaacaggcgtgcccagcagattttctggcagcggctctggcaccgactacaccctgacaatatccagcctccagcctgaggacttcgccacctactactgtcagcagagctggaacaccccttggacattcggccagggcaccaagctggaaatcaagagaggcggaggcggaagtggaggcggaggatctggcggcggaggctctcaagttcagcttcaacagcctggcgctgagctggtcaaacctggcgcttctgtgaagatgagctgcaaagccagcggctacgccttcagcagctactggatcaactggatgaagcagaaacccggccagggactcgaatggatcggccaaatctatcccggcgacggcgacaccaactacaacggcaagttcaagggcagagccacactgaccgccgatacctctagcagcacagcctacatgcagctgagcagcctgaccagcgaagatagcgccgtgtacttctgtgcccggtccatcacaacagtcgtgggctgcgctatggactattggggccagggaacaagcgtgaccgtgtctagtacgcgtaaaattgaagttatgtatcctcctccttacctagacaatgagaagagcaatggaaccattatccatgtgaaaggggcgcgtacaacacctggcgagagaagtagcctgcctgccttctatcctggcaccagcggctcttgttctggctgtggatctctgagcctgcctctgctggctggactggttgctgctgatgctgtggcctctctgctgattgtgggagccgtgttcaggagtaagaggagcaggctcctgcacagtgactacatgaacatgactccacgccgccccggacccacccgcaagcattaccagccctatgccccaccacgcgacttcgcagcctatcgctccctgtgcgccagacctagaagaagccccgctcaagaggacggcaaggtgtacatcaacatgcccggcagagga

SEQ ID NO: 8850 - DNA, 1212 bp, Artificial Sequence
  Synthetic Polynucleotide
atggccttaccagtgaccgccttgctcctgccgctggccttgctgctccacgccgccaggccggacatccagatgacacagagccctagcagcctgtctgccagcgtgggagacagagtgaccatcacatgcaaggccagcgaccacatcaacaactggctggcctggtatcagcagaagcctggacaggcccctaagctgctgatctacggcgctaccacactggaaacaggcgtgcccagcagattttctggcagcggctctggcaccgactacaccctgacaatatccagcctccagcctgaggacttcgccacctactactgtcagcagagctggaacaccccttggacattcggccagggcaccaagctggaaatcaagagaggcggaggcggaagtggaggcggaggatctggcggcggaggctctcaagttcagcttcaacagcctggcgctgagctggtcaaacctggcgcttctgtgaagatgagctgcaaagccagcggctacgccttcagcagctactggatcaactggatgaagcagaaacccggccagggactcgaatggatcggccaaatctatcccggcgacggcgacaccaactacaacggcaagttcaagggcagagccacactgaccgccgatacctctagcagcacagcctacatgcagctgagcagcctgaccagcgaagatagcgccgtgtacttctgtgcccggtccatcacaacagtcgtgggctgcgctatggactattggggccagggaacaagcgtgaccgtgtctagtacgcgtaaaattgaagttatgtatcctcctccttacctagacaatgagaagagcaatggaaccattatccatgtgaaaggggcgcgtacaacacctggcgagagaagtagcctgcctgccttctatcctggcaccagcggctcttgttctggctgtggatctctgagcctgcctctgctggctggactggttgctgctgatgctgtggcctctctgctgattgtgggagccgtgttcagggaccaaagactgcctcctgacgctcacaaacctccaggcggaggcagcttcagaacccctatccaagaggaacaggctgacgcccacagcaccctggcaaaaattctgtgcgccagacctagaagaagccccgctcaagaggacggcaaggtgtacatcaacatgcccggcagagga

SEQ ID NO: 8851 - DNA, 1464 bp, Artificial Sequence
  Synthetic Polynucleotide
atggccttaccagtgaccgccttgctcctgccgctggccttgctgctccacgccgccaggccggacatccagatgacacagagccctagcagcctgtctgccagcgtgggagacagagtgaccatcacatgcaaggccagcgaccacatcaacaactggctggcctggtatcagcagaagcctggacaggcccctaagctgctgatctacggcgctaccacactggaaacaggcgtgcccagcagattttctggcagcggctctggcaccgactacaccctgacaatatccagcctccagcctgaggacttcgccacctactactgtcagcagagctggaacaccccttggacattcggccagggcaccaagctggaaatcaagagaggcggaggcggaagtggaggcggaggatctggcggcggaggctctcaagttcagcttcaacagcctggcgctgagctggtcaaacctggcgcttctgtgaagatgagctgcaaagccagcggctacgccttcagcagctactggatcaactggatgaagcagaaacccggccagggactcgaatggatcggccaaatctatcccggcgacggcgacaccaactacaacggcaagttcaagggcagagccacactgaccgccgatacctctagcagcacagcctacatgcagctgagcagcctgaccagcgaagatagcgccgtgtacttctgtgcccggtccatcacaacagtcgtgggctgcgctatggactattggggccagggaacaagcgtgaccgtgtctagtacgcgtaaaattgaagttatgtatcctcctccttacctagacaatgagaagagcaatggaaccattatccatgtgaaaggggcgcgtacaacacctggcgagagaagtagcctgcctgccttctatcctggcaccagcggctcttgttctggctgtggatctctgagcctgcctctgctggctggactggttgctgctgatgctgtggcctctctgctgattgtgggagccgtgttctggcggcggaagcggaaagagaagcagtctgagacaagccccaaagagttcctgaccatctacgaggacgtgaaggacctgaaaacccggcggaaccacgaacaagagcagacctttcctggcggaggcagcaccatctacagcatgatccagagccagagcagcgcccctacaagccaagagcctgcctacacactgtactccctgatccagcctagcagaaagagcggcagccggaagagaaatcacagccccagcttcaacagcacgatctacgaagtgatcggcaagagccagccaaaggctcagaaccctgccagactgagccggaaagagctggaaaacttcgacgtgtacagcctgtgcgccagacctagaagaagccccgctcaagaggacggcaaggtgtacatcaacatgcccggcagagga

SEQ ID NO: 8852 - DNA, 1212 bp, Artificial Sequence
  Synthetic Polynucleotide
atggccttaccagtgaccgccttgctcctgccgctggccttgctgctccacgccgccaggccggacatccagatgacacagagccctagcagcctgtctgccagcgtgggagacagagtgaccatcacatgcaaggccagcgaccacatcaacaactggctggcctggtatcagcagaagcctggacaggcccctaagctgctgatctacggcgctaccacactggaaacaggcgtgcccagcagattttctggcagcggctctggcaccgactacaccctgacaatatccagcctccagcctgaggacttcgccacctactactgtcagcagagctggaacaccccttggacattcggccagggcaccaagctggaaatcaagagaggcggaggcggaagtggaggcggaggatctggcggcggaggctctcaagttcagcttcaacagcctggcgctgagctggtcaaacctggcgcttctgtgaagatgagctgcaaagccagcggctacgccttcagcagctactggatcaactggatgaagcagaaacccggccagggactcgaatggatcggccaaatctatcccggcgacggcgacaccaactacaacggcaagttcaagggcagagccacactgaccgccgatacctctagcagcacagcctacatgcagctgagcagcctgaccagcgaagatagcgccgtgtacttctgtgcccggtccatcacaacagtcgtgggctgcgctatggactattggggccagggaacaagcgtgaccgtgtctagtacgcgtaaaattgaagttatgtatcctcctccttacctagacaatgagaagagcaatggaaccattatccatgtgaaaggggcgcgtctgggagagcctcagctgtgctatatcctggacgccatcctgtttctgtacggcatcgtgctgaccctgctgtactgcaaacggggcagaaagaaactcctgtatatattcaaacaaccatttatgagaccagtacaaactactcaagaggaagatggctgtagctgccgatttccagaagaagaagaaggaggatgtgaactgcggctgaagatccaagtgcggaaggccgccatcaccagctacgagaaatccgacggcgtgtacaccggcctgagcaccagaaatcaagagacatacgagacactgaagcacgaaaagcctccacaa

SEQ ID NO: 8853 - DNA, 1209 bp, Artificial Sequence
  Synthetic Polynucleotide
atggccttaccagtgaccgccttgctcctgccgctggccttgctgctccacgccgccaggccggacatccagatgacacagagccctagcagcctgtctgccagcgtgggagacagagtgaccatcacatgcaaggccagcgaccacatcaacaactggctggcctggtatcagcagaagcctggacaggcccctaagctgctgatctacggcgctaccacactggaaacaggcgtgcccagcagattttctggcagcggctctggcaccgactacaccctgacaatatccagcctccagcctgaggacttcgccacctactactgtcagcagagctggaacaccccttggacattcggccagggcaccaagctggaaatcaagagaggcggaggcggaagtggaggcggaggatctggcggcggaggctctcaagttcagcttcaacagcctggcgctgagctggtcaaacctggcgcttctgtgaagatgagctgcaaagccagcggctacgccttcagcagctactggatcaactggatgaagcagaaacccggccagggactcgaatggatcggccaaatctatcccggcgacggcgacaccaactacaacggcaagttcaagggcagagccacactgaccgccgatacctctagcagcacagcctacatgcagctgagcagcctgaccagcgaagatagcgccgtgtacttctgtgcccggtccatcacaacagtcgtgggctgcgctatggactattggggccagggaacaagcgtgaccgtgtctagtacgcgtaaaattgaagttatgtatcctcctccttacctagacaatgagaagagcaatggaaccattatccatgtgaaaggggcgcgtctgggagagcctcagctgtgctatatcctggacgccatcctgtttctgtacggcatcgtgctgaccctgctgtactgcaggagtaagaggagcaggctcctgcacagtgactacatgaacatgactccacgccgccccggacccacccgcaagcattaccagccctatgccccaccacgcgacttcgcagcctatcgctcccggctgaagatccaagtgcggaaggccgccatcaccagctacgagaaatccgacggcgtgtacaccggcctgagcaccagaaatcaagagacatacgagacactgaagcacgaaaagcctccacaa

SEQ ID NO: 8854 - DNA, 1194 bp, Artificial Sequence
  Synthetic Polynucleotide
atggccttaccagtgaccgccttgctcctgccgctggccttgctgctccacgccgccaggccggacatccagatgacacagagccctagcagcctgtctgccagcgtgggagacagagtgaccatcacatgcaaggccagcgaccacatcaacaactggctggcctggtatcagcagaagcctggacaggcccctaagctgctgatctacggcgctaccacactggaaacaggcgtgcccagcagattttctggcagcggctctggcaccgactacaccctgacaatatccagcctccagcctgaggacttcgccacctactactgtcagcagagctggaacaccccttggacattcggccagggcaccaagctggaaatcaagagaggcggaggcggaagtggaggcggaggatctggcggcggaggctctcaagttcagcttcaacagcctggcgctgagctggtcaaacctggcgcttctgtgaagatgagctgcaaagccagcggctacgccttcagcagctactggatcaactggatgaagcagaaacccggccagggactcgaatggatcggccaaatctatcccggcgacggcgacaccaactacaacggcaagttcaagggcagagccacactgaccgccgatacctctagcagcacagcctacatgcagctgagcagcctgaccagcgaagatagcgccgtgtacttctgtgcccggtccatcacaacagtcgtgggctgcgctatggactattggggccagggaacaagcgtgaccgtgtctagtacgcgtaaaattgaagttatgtatcctcctccttacctagacaatgagaagagcaatggaaccattatccatgtgaaaggggcgcgtctgggagagcctcagctgtgctatatcctggacgccatcctgtttctgtacggcatcgtgctgaccctgctgtactgcagggaccaaagactgcctcctgacgctcacaaacctccaggcggaggcagcttcagaacccctatccaagaggaacaggctgacgcccacagcaccctggcaaaaattcggctgaagatccaagtgcggaaggccgccatcaccagctacgagaaatccgacggcgtgtacaccggcctgagcaccagaaatcaagagacatacgagacactgaagcacgaaaagcctccacaa

SEQ ID NO: 8855 - DNA, 1446 bp, Artificial Sequence
  Synthetic Polynucleotide
atggccttaccagtgaccgccttgctcctgccgctggccttgctgctccacgccgccaggccggacatccagatgacacagagccctagcagcctgtctgccagcgtgggagacagagtgaccatcacatgcaaggccagcgaccacatcaacaactggctggcctggtatcagcagaagcctggacaggcccctaagctgctgatctacggcgctaccacactggaaacaggcgtgcccagcagattttctggcagcggctctggcaccgactacaccctgacaatatccagcctccagcctgaggacttcgccacctactactgtcagcagagctggaacaccccttggacattcggccagggcaccaagctggaaatcaagagaggcggaggcggaagtggaggcggaggatctggcggcggaggctctcaagttcagcttcaacagcctggcgctgagctggtcaaacctggcgcttctgtgaagatgagctgcaaagccagcggctacgccttcagcagctactggatcaactggatgaagcagaaacccggccagggactcgaatggatcggccaaatctatcccggcgacggcgacaccaactacaacggcaagttcaagggcagagccacactgaccgccgatacctctagcagcacagcctacatgcagctgagcagcctgaccagcgaagatagcgccgtgtacttctgtgcccggtccatcacaacagtcgtgggctgcgctatggactattggggccagggaacaagcgtgaccgtgtctagtacgcgtaaaattgaagttatgtatcctcctccttacctagacaatgagaagagcaatggaaccattatccatgtgaaaggggcgcgtctgggagagcctcagctgtgctatatcctggacgccatcctgtttctgtacggcatcgtgctgaccctgctgtactgctggcggcggaagcggaaagagaagcagtctgagacaagccccaaagagttcctgaccatctacgaggacgtgaaggacctgaaaacccggcggaaccacgaacaagagcagacctttcctggcggaggcagcaccatctacagcatgatccagagccagagcagcgcccctacaagccaagagcctgcctacacactgtactccctgatccagcctagcagaaagagcggcagccggaagagaaatcacagccccagcttcaacagcacgatctacgaagtgatcggcaagagccagccaaaggctcagaaccctgccagactgagccggaaagagctggaaaacttcgacgtgtacagccggctgaagatccaagtgcggaaggccgccatcaccagctacgagaaatccgacggcgtgtacaccggcctgagcaccagaaatcaagagacatacgagacactgaagcacgaaaagcctccacaa

SEQ ID NO: 8856 - DNA, 1086 bp, Artificial Sequence
  Synthetic Polynucleotide
atggccttaccagtgaccgccttgctcctgccgctggccttgctgctccacgccgccaggccggacatccagatgacacagagccctagcagcctgtctgccagcgtgggagacagagtgaccatcacatgcaaggccagcgaccacatcaacaactggctggcctggtatcagcagaagcctggacaggcccctaagctgctgatctacggcgctaccacactggaaacaggcgtgcccagcagattttctggcagcggctctggcaccgactacaccctgacaatatccagcctccagcctgaggacttcgccacctactactgtcagcagagctggaacaccccttggacattcggccagggcaccaagctggaaatcaagagaggcggaggcggaagtggaggcggaggatctggcggcggaggctctcaagttcagcttcaacagcctggcgctgagctggtcaaacctggcgcttctgtgaagatgagctgcaaagccagcggctacgccttcagcagctactggatcaactggatgaagcagaaacccggccagggactcgaatggatcggccaaatctatcccggcgacggcgacaccaactacaacggcaagttcaagggcagagccacactgaccgccgatacctctagcagcacagcctacatgcagctgagcagcctgaccagcgaagatagcgccgtgtacttctgtgcccggtccatcacaacagtcgtgggctgcgctatggactattggggccagggaacaagcgtgaccgtgtctagtacgcgtaaaattgaagttatgtatcctcctccttacctagacaatgagaagagcaatggaaccattatccatgtgaaaggggcgcgtctgggagagcctcagctgagctatatcctggacgccatcctgtttctgtacggcatcgtgctgaccctgctgtactgccggctgaagatccaagtgcggaaggccgccatcaccagctacgagaaatccgacggcgtgtacaccggcctgagcaccagaaatcaagagacatacgagacactgaagcacgaaaagcctccacaa

SEQ ID NO: 8857 - DNA, 1140 bp, Artificial Sequence
  Synthetic Polynucleotide
atggccttaccagtgaccgccttgctcctgccgctggccttgctgctccacgccgccaggccggacatccagatgacacagagccctagcagcctgtctgccagcgtgggagacagagtgaccatcacatgcaaggccagcgaccacatcaacaactggctggcctggtatcagcagaagcctggacaggcccctaagctgctgatctacggcgctaccacactggaaacaggcgtgcccagcagattttctggcagcggctctggcaccgactacaccctgacaatatccagcctccagcctgaggacttcgccacctactactgtcagcagagctggaacaccccttggacattcggccagggcaccaagctggaaatcaagagaggcggaggcggaagtggaggcggaggatctggcggcggaggctctcaagttcagcttcaacagcctggcgctgagctggtcaaacctggcgcttctgtgaagatgagctgcaaagccagcggctacgccttcagcagctactggatcaactggatgaagcagaaacccggccagggactcgaatggatcggccaaatctatcccggcgacggcgacaccaactacaacggcaagttcaagggcagagccacactgaccgccgatacctctagcagcacagcctacatgcagctgagcagcctgaccagcgaagatagcgccgtgtacttctgtgcccggtccatcacaacagtcgtgggctgcgctatggactattggggccagggaacaagcgtgaccgtgtctagtacgcgtaaaattgaagttatgtatcctcctccttacctagacaatgagaagagcaatggaaccattatccatgtgaaaggggcgcgtcaggctcagagcgattgcagctgtagcacagtgtctccaggcgtgctggccggaattgtgatgggcgatctggtgctgacagtgctgattgccctggccgtgtacttcctgggtagactggtgcctagaggaagaggcgctgccgaagccgccacaagaaagcagagaatcaccgagacagagagcccctaccaagagctgcaaggccagagaagcgacgtgtacagcgacctgaatacccagcggccttactacaaa

SEQ ID NO: 8858 - DNA, 1140 bp, Artificial Sequence
  Synthetic Polynucleotide
atggccttaccagtgaccgccttgctcctgccgctggccttgctgctccacgccgccaggccggacatccagatgacacagagccctagcagcctgtctgccagcgtgggagacagagtgaccatcacatgcaaggccagcgaccacatcaacaactggctggcctggtatcagcagaagcctggacaggcccctaagctgctgatctacggcgctaccacactggaaacaggcgtgcccagcagattttctggcagcggctctggcaccgactacaccctgacaatatccagcctccagcctgaggacttcgccacctactactgtcagcagagctggaacaccccttggacattcggccagggcaccaagctggaaatcaagagaggcggaggcggaagtggaggcggaggatctggcggcggaggctctcaagttcagcttcaacagcctggcgctgagctggtcaaacctggcgcttctgtgaagatgagctgcaaagccagcggctacgccttcagcagctactggatcaactggatgaagcagaaacccggccagggactcgaatggatcggccaaatctatcccggcgacggcgacaccaactacaacggcaagttcaagggcagagccacactgaccgccgatacctctagcagcacagcctacatgcagctgagcagcctgaccagcgaagatagcgccgtgtacttctgtgcccggtccatcacaacagtcgtgggctgcgctatggactattggggccagggaacaagcgtgaccgtgtctagtacgcgtaaaattgaagttatgtatcctcctccttacctagacaatgagaagagcaatggaaccattatccatgtgaaaggggcgcgtcaggctcagagcgattgcagctctagcacagtgtctccaggcgtgctggccggaattgtgatgggcgatctggtgctgacagtgctgattgccctggccgtgtacttcctgggtagactggtgcctagaggaagaggcgctgccgaagccgccacaagaaagcagagaatcaccgagacagagagcccctaccaagagctgcaaggccagagaagcgacgtgtacagcgacctgaatacccagcggccttactacaaa

SEQ ID NO: 8859 - DNA, 1266 bp, Artificial Sequence
  Synthetic Polynucleotide
atggccttaccagtgaccgccttgctcctgccgctggccttgctgctccacgccgccaggccggacatccagatgacacagagccctagcagcctgtctgccagcgtgggagacagagtgaccatcacatgcaaggccagcgaccacatcaacaactggctggcctggtatcagcagaagcctggacaggcccctaagctgctgatctacggcgctaccacactggaaacaggcgtgcccagcagattttctggcagcggctctggcaccgactacaccctgacaatatccagcctccagcctgaggacttcgccacctactactgtcagcagagctggaacaccccttggacattcggccagggcaccaagctggaaatcaagagaggcggaggcggaagtggaggcggaggatctggcggcggaggctctcaagttcagcttcaacagcctggcgctgagctggtcaaacctggcgcttctgtgaagatgagctgcaaagccagcggctacgccttcagcagctactggatcaactggatgaagcagaaacccggccagggactcgaatggatcggccaaatctatcccggcgacggcgacaccaactacaacggcaagttcaagggcagagccacactgaccgccgatacctctagcagcacagcctacatgcagctgagcagcctgaccagcgaagatagcgccgtgtacttctgtgcccggtccatcacaacagtcgtgggctgcgctatggactattggggccagggaacaagcgtgaccgtgtctagtacgcgtaaaattgaagttatgtatcctcctccttacctagacaatgagaagagcaatggaaccattatccatgtgaaaggggcgcgtcaggctcagagcgattgcagctgtagcacagtgtctccaggcgtgctggccggaattgtgatgggcgatctggtgctgacagtgctgattgccctggccgtgtacttcctgggtagactggtgcctagaggaagaggcgctgccgaagccgccacaagaaagcagagaatcaccgagacagagagcccctaccaagagctgcaaggccagagaagcgacgtgtacagcgacctgaatacccagaaacggggcagaaagaaactcctgtatatattcaaacaaccatttatgagaccagtacaaactactcaagaggaagatggctgtagctgccgatttccagaagaagaagaaggaggatgtgaactgcggccttactacaaa

SEQ ID NO: 8860 - DNA, 1263 bp, Artificial Sequence
  Synthetic Polynucleotide
atggccttaccagtgaccgccttgctcctgccgctggccttgctgctccacgccgccaggccggacatccagatgacacagagccctagcagcctgtctgccagcgtgggagacagagtgaccatcacatgcaaggccagcgaccacatcaacaactggctggcctggtatcagcagaagcctggacaggcccctaagctgctgatctacggcgctaccacactggaaacaggcgtgcccagcagattttctggcagcggctctggcaccgactacaccctgacaatatccagcctccagcctgaggacttcgccacctactactgtcagcagagctggaacaccccttggacattcggccagggcaccaagctggaaatcaagagaggcggaggcggaagtggaggcggaggatctggcggcggaggctctcaagttcagcttcaacagcctggcgctgagctggtcaaacctggcgcttctgtgaagatgagctgcaaagccagcggctacgccttcagcagctactggatcaactggatgaagcagaaacccggccagggactcgaatggatcggccaaatctatcccggcgacggcgacaccaactacaacggcaagttcaagggcagagccacactgaccgccgatacctctagcagcacagcctacatgcagctgagcagcctgaccagcgaagatagcgccgtgtacttctgtgcccggtccatcacaacagtcgtgggctgcgctatggactattggggccagggaacaagcgtgaccgtgtctagtacgcgtaaaattgaagttatgtatcctcctccttacctagacaatgagaagagcaatggaaccattatccatgtgaaaggggcgcgtcaggctcagagcgattgcagctgtagcacagtgtctccaggcgtgctggccggaattgtgatgggcgatctggtgctgacagtgctgattgccctggccgtgtacttcctgggtagactggtgcctagaggaagaggcgctgccgaagccgccacaagaaagcagagaatcaccgagacagagagcccctaccaagagctgcaaggccagagaagcgacgtgtacagcgacctgaatacccagaggagcaagcggtcacggctgctccacagcgattacatgaatatgacaccacgaagaccgggtcctactcgcaaacactaccaaccctacgcacctccccgcgactttgcagcgtaccgatctcggccttactacaaa

SEQ ID NO: 8861 - DNA, 1248 bp, Artificial Sequence
  Synthetic Polynucleotide
atggccttaccagtgaccgccttgctcctgccgctggccttgctgctccacgccgccaggccggacatccagatgacacagagccctagcagcctgtctgccagcgtgggagacagagtgaccatcacatgcaaggccagcgaccacatcaacaactggctggcctggtatcagcagaagcctggacaggcccctaagctgctgatctacggcgctaccacactggaaacaggcgtgcccagcagattttctggcagcggctctggcaccgactacaccctgacaatatccagcctccagcctgaggacttcgccacctactactgtcagcagagctggaacaccccttggacattcggccagggcaccaagctggaaatcaagagaggcggaggcggaagtggaggcggaggatctggcggcggaggctctcaagttcagcttcaacagcctggcgctgagctggtcaaacctggcgcttctgtgaagatgagctgcaaagccagcggctacgccttcagcagctactggatcaactggatgaagcagaaacccggccagggactcgaatggatcggccaaatctatcccggcgacggcgacaccaactacaacggcaagttcaagggcagagccacactgaccgccgatacctctagcagcacagcctacatgcagctgagcagcctgaccagcgaagatagcgccgtgtacttctgtgcccggtccatcacaacagtcgtgggctgcgctatggactattggggccagggaacaagcgtgaccgtgtctagtacgcgtaaaattgaagttatgtatcctcctccttacctagacaatgagaagagcaatggaaccattatccatgtgaaaggggcgcgtcaggctcagagcgattgcagctgtagcacagtgtctccaggcgtgctggccggaattgtgatgggcgatctggtgctgacagtgctgattgccctggccgtgtacttcctgggtagactggtgcctagaggaagaggcgctgccgaagccgccacaagaaagcagagaatcaccgagacagagagcccctaccaagagctgcaaggccagagaagcgacgtgtacagcgacctgaatacccagagggaccaaagactgcctcctgacgctcacaaacctccaggcggaggcagcttcagaacccctatccaagaggaacaggctgacgcccacagcaccctggcaaaaattcggccttactacaaa

SEQ ID NO: 8862 - DNA, 1500 bp, Artificial Sequence
  Synthetic Polynucleotide
atggccttaccagtgaccgccttgctcctgccgctggccttgctgctccacgccgccaggccggacatccagatgacacagagccctagcagcctgtctgccagcgtgggagacagagtgaccatcacatgcaaggccagcgaccacatcaacaactggctggcctggtatcagcagaagcctggacaggcccctaagctgctgatctacggcgctaccacactggaaacaggcgtgcccagcagattttctggcagcggctctggcaccgactacaccctgacaatatccagcctccagcctgaggacttcgccacctactactgtcagcagagctggaacaccccttggacattcggccagggcaccaagctggaaatcaagagaggcggaggcggaagtggaggcggaggatctggcggcggaggctctcaagttcagcttcaacagcctggcgctgagctggtcaaacctggcgcttctgtgaagatgagctgcaaagccagcggctacgccttcagcagctactggatcaactggatgaagcagaaacccggccagggactcgaatggatcggccaaatctatcccggcgacggcgacaccaactacaacggcaagttcaagggcagagccacactgaccgccgatacctctagcagcacagcctacatgcagctgagcagcctgaccagcgaagatagcgccgtgtacttctgtgcccggtccatcacaacagtcgtgggctgcgctatggactattggggccagggaacaagcgtgaccgtgtctagtacgcgtaaaattgaagttatgtatcctcctccttacctagacaatgagaagagcaatggaaccattatccatgtgaaaggggcgcgtcaggctcagagcgattgcagctgtagcacagtgtctccaggcgtgctggccggaattgtgatgggcgatctggtgctgacagtgctgattgccctggccgtgtacttcctgggtagactggtgcctagaggaagaggcgctgccgaagccgccacaagaaagcagagaatcaccgagacagagagcccctaccaagagctgcaaggccagagaagcgacgtgtacagcgacctgaatacccagtggcggcggaagcggaaagagaagcagtctgagacaagccccaaagagttcctgaccatctacgaggacgtgaaggacctgaaaacccggcggaaccacgaacaagagcagacctttcctggcggaggcagcaccatctacagcatgatccagagccagagcagcgcccctacaagccaagagcctgcctacacactgtactccctgatccagcctagcagaaagagcggcagccggaagagaaatcacagccccagcttcaacagcacgatctacgaagtgatcggcaagagccagccaaaggctcagaaccctgccagactgagccggaaagagctggaaaacttcgacgtgtacagccggccttactacaaa

SEQ ID NO: 8863 - DNA, 1452 bp, Artificial Sequence
  Synthetic Polynucleotide
atggccttaccagtgaccgccttgctcctgccgctggccttgctgctccacgccgccaggccggacatccagatgacacagagccctagcagcctgtctgccagcgtgggagacagagtgaccatcacatgcaaggccagcgaccacatcaacaactggctggcctggtatcagcagaagcctggacaggcccctaagctgctgatctacggcgctaccacactggaaacaggcgtgcccagcagattttctggcagcggctctggcaccgactacaccctgacaatatccagcctccagcctgaggacttcgccacctactactgtcagcagagctggaacaccccttggacattcggccagggcaccaagctggaaatcaagagaggcggaggcggaagtggaggcggaggatctggcggcggaggctctcaagttcagcttcaacagcctggcgctgagctggtcaaacctggcgcttctgtgaagatgagctgcaaagccagcggctacgccttcagcagctactggatcaactggatgaagcagaaacccggccagggactcgaatggatcggccaaatctatcccggcgacggcgacaccaactacaacggcaagttcaagggcagagccacactgaccgccgatacctctagcagcacagcctacatgcagctgagcagcctgaccagcgaagatagcgccgtgtacttctgtgcccggtccatcacaacagtcgtgggctgcgctatggactattggggccagggaacaagcgtgaccgtgtctagtacgcgtaaaattgaagttatgtatcctcctccttacctagacaatgagaagagcaatggaaccattatccatgtgaaaggggcgcgtacaacgccgggcgaaaggagttccttgccggccttttaccccggcacaagcggaagctgtagtgggtgtggaagcctcagcctcccacttcttgcgggcctcgtcgcggcagatgcagtagcttcacttcttattgtaggcgcggtatttctctgtgctcgaccaaggaggtcacccgctcaggaggatggtaaggtgtatataaatatgccaggacgcggaagctctagacgggttaagttttccagatccgcagacgcacccgcttaccaacaagggcagaaccaactctacaatgaacttaatttggggcggagggaagagtacgacgttctggacaaaaggaggggacgagatcccgagatgggcggaaagcctcagcgaaggaagaatccgcaagaggggctttataacgaactccagaaagataaaatggcagaagcctatagtgagattgggatgaagggagaaaggaggaggggtaaaggtcacgatgggttgtaccaaggattgagcacagccactaaagatacctatgatgcgctccacatgcaggccctgccgccaaga

SEQ ID NO: 8864 - DNA, 1464 bp, Artificial Sequence
  Synthetic Polynucleotide
atggccttaccagtgaccgccttgctcctgccgctggccttgctgctccacgccgccaggccggacatccagatgacacagagccctagcagcctgtctgccagcgtgggagacagagtgaccatcacatgcaaggccagcgaccacatcaacaactggctggcctggtatcagcagaagcctggacaggcccctaagctgctgatctacggcgctaccacactggaaacaggcgtgcccagcagattttctggcagcggctctggcaccgactacaccctgacaatatccagcctccagcctgaggacttcgccacctactactgtcagcagagctggaacaccccttggacattcggccagggcaccaagctggaaatcaagagaggcggaggcggaagtggaggcggaggatctggcggcggaggctctcaagttcagcttcaacagcctggcgctgagctggtcaaacctggcgcttctgtgaagatgagctgcaaagccagcggctacgccttcagcagctactggatcaactggatgaagcagaaacccggccagggactcgaatggatcggccaaatctatcccggcgacggcgacaccaactacaacggcaagttcaagggcagagccacactgaccgccgatacctctagcagcacagcctacatgcagctgagcagcctgaccagcgaagatagcgccgtgtacttctgtgcccggtccatcacaacagtcgtgggctgcgctatggactattggggccagggaacaagcgtgaccgtgtctagtacgcgtaaaattgaagttatgtatcctcctccttacctagacaatgagaagagcaatggaaccattatccatgtgaaaggggcgcgtcaggctcagagcgattgcagctgtagcacagtgtctccaggcgtgctggccggaattgtgatgggcgatctggtgctgacagtgctgattgccctggccgtgtacttcctgggtagactggtgcctagaggaagaggcgctgccgaagccgccacaagaaagcagagaatcaccgagacagagagcccctaccaagagctgcaaggccagagaagcgacgtgtacagcgacctgaatacccagagagtgaagttcagcagaagcgccgacgcccctgcctaccagcagggacagaaccaactgtacaacgagctgaacctgggcagacgggaagagtacgacgtgctggacaagcggagaggcagggaccctgagatgggcggaaagccccagcggagaaagaacccccaggaaggactgtataacgaactccagaaagacaagatggccgaagcctacagcgagatcggcatgaagggcgagcggagaagaggcaagggccacgatggcctgtaccagggcctgagcaccgccaccaaggacacctatgacgccctgcacatgcaggccctgcctccaaga

SEQ ID NO: 8865 - DNA, 1026 bp, Artificial Sequence
  Synthetic Polynucleotide
atggccttaccagtgaccgccttgctcctgccgctggccttgctgctccacgccgccaggccggacatccagatgacacagagccctagcagcctgtctgccagcgtgggagacagagtgaccatcacatgcaaggccagcgaccacatcaacaactggctggcctggtatcagcagaagcctggacaggcccctaagctgctgatctacggcgctaccacactggaaacaggcgtgcccagcagattttctggcagcggctctggcaccgactacaccctgacaatatccagcctccagcctgaggacttcgccacctactactgtcagcagagctggaacaccccttggacattcggccagggcaccaagctggaaatcaagagaggcggaggcggaagtggaggcggaggatctggcggcggaggctctcaagttcagcttcaacagcctggcgctgagctggtcaaacctggcgcttctgtgaagatgagctgcaaagccagcggctacgccttcagcagctactggatcaactggatgaagcagaaacccggccagggactcgaatggatcggccaaatctatcccggcgacggcgacaccaactacaacggcaagttcaagggcagagccacactgaccgccgatacctctagcagcacagcctacatgcagctgagcagcctgaccagcgaagatagcgccgtgtacttctgtgcccggtccatcacaacagtcgtgggctgcgctatggactattggggccagggaacaagcgtgaccgtgtctagtacgcgtaaaattgaagttatgtatcctcctccttacctagacaatgagaagagcaatggaaccattatccatgtgaaaggggcgcgttaccaagtgtccttctgcctggtcatggtgctgctgttcgccgtggataccggcctgtacttcagcgtcaagaccaacatccggtccagcaccagagactggaaggaccacaagttcaagtggcggaaggaccctcaggacaag

SEQ ID NO: 8866 - DNA, 1026 bp, Artificial Sequence
  Synthetic Polynucleotide
atggccttaccagtgaccgccttgctcctgccgctggccttgctgctccacgccgccaggccggacatccagatgacacagagccctagcagcctgtctgccagcgtgggagacagagtgaccatcacatgcaaggccagcgaccacatcaacaactggctggcctggtatcagcagaagcctggacaggcccctaagctgctgatctacggcgctaccacactggaaacaggcgtgcccagcagattttctggcagcggctctggcaccgactacaccctgacaatatccagcctccagcctgaggacttcgccacctactactgtcagcagagctggaacaccccttggacattcggccagggcaccaagctggaaatcaagagaggcggaggcggaagtggaggcggaggatctggcggcggaggctctcaagttcagcttcaacagcctggcgctgagctggtcaaacctggcgcttctgtgaagatgagctgcaaagccagcggctacgccttcagcagctactggatcaactggatgaagcagaaacccggccagggactcgaatggatcggccaaatctatcccggcgacggcgacaccaactacaacggcaagttcaagggcagagccacactgaccgccgatacctctagcagcacagcctacatgcagctgagcagcctgaccagcgaagatagcgccgtgtacttctgtgcccggtccatcacaacagtcgtgggctgcgctatggactattggggccagggaacaagcgtgaccgtgtctagtacgcgtaaaattgaagttatgtatcctcctccttacctagacaatgagaagagcaatggaaccattatccatgtgaaaggggcgcgttaccaagtctccttctgtcttgtgatggtcctcctgtttgctgtggacacaggactgtacttttccgtgaaaacgaacatccgcagctccacacgcgattggaaagatcacaagtttaaatggcgcaaagatccccaggacaag

SEQ ID NO: 8867 - DNA, 963 bp, Artificial Sequence
  Synthetic Polynucleotide
atggccttaccagtgaccgccttgctcctgccgctggccttgctgctccacgccgccaggccggacatccagatgacacagagccctagcagcctgtctgccagcgtgggagacagagtgaccatcacatgcaaggccagcgaccacatcaacaactggctggcctggtatcagcagaagcctggacaggcccctaagctgctgatctacggcgctaccacactggaaacaggcgtgcccagcagattttctggcagcggctctggcaccgactacaccctgacaatatccagcctccagcctgaggacttcgccacctactactgtcagcagagctggaacaccccttggacattcggccagggcaccaagctggaaatcaagagaggcggaggcggaagtggaggcggaggatctggcggcggaggctctcaagttcagcttcaacagcctggcgctgagctggtcaaacctggcgcttctgtgaagatgagctgcaaagccagcggctacgccttcagcagctactggatcaactggatgaagcagaaacccggccagggactcgaatggatcggccaaatctatcccggcgacggcgacaccaactacaacggcaagttcaagggcagagccacactgaccgccgatacctctagcagcacagcctacatgcagctgagcagcctgaccagcgaagatagcgccgtgtacttctgtgcccggtccatcacaacagtcgtgggctgcgctatggactattggggccagggaacaagcgtgaccgtgtctagtacgcgtaaaattgaagttatgtatcctcctccttacctagacaatgagaagagcaatggaaccattatccatgtgaaaggggcgcgttaccaagtctccttctgtcttgtgatggtcctcctgtttgctgtggacacaggactgtacttttccgtgaaaacgaacatc

SEQ ID NO: 8868 - DNA, 1080 bp, Artificial Sequence
  Synthetic Polynucleotide
atggccttaccagtgaccgccttgctcctgccgctggccttgctgctccacgccgccaggccggacatccagatgacacagagccctagcagcctgtctgccagcgtgggagacagagtgaccatcacatgcaaggccagcgaccacatcaacaactggctggcctggtatcagcagaagcctggacaggcccctaagctgctgatctacggcgctaccacactggaaacaggcgtgcccagcagattttctggcagcggctctggcaccgactacaccctgacaatatccagcctccagcctgaggacttcgccacctactactgtcagcagagctggaacaccccttggacattcggccagggcaccaagctggaaatcaagagaggcggaggcggaagtggaggcggaggatctggcggcggaggctctcaagttcagcttcaacagcctggcgctgagctggtcaaacctggcgcttctgtgaagatgagctgcaaagccagcggctacgccttcagcagctactggatcaactggatgaagcagaaacccggccagggactcgaatggatcggccaaatctatcccggcgacggcgacaccaactacaacggcaagttcaagggcagagccacactgaccgccgatacctctagcagcacagcctacatgcagctgagcagcctgaccagcgaagatagcgccgtgtacttctgtgcccggtccatcacaacagtcgtgggctgcgctatggactattggggccagggaacaagcgtgaccgtgtctagtacgcgtaaaattgaagttatgtatcctcctccttacctagacaatgagaagagcaatggaaccattatccatgtgaaaggggcgcgtgctggcaccgtcctgttgcttagagccggattctatgccgtcagcttcctgtccgtggctgtggggtctacagtgtattaccagggaaaatgtctcacctggaaaggccccagacgccagcttccagctgttgttcctgctccactgccaccaccttgtggctcctctgctcacttgcttccaccagtgcctggcgga

SEQ ID NO: 8869 - DNA, 1134 bp, Artificial Sequence
  Synthetic Polynucleotide
atggccttaccagtgaccgccttgctcctgccgctggccttgctgctccacgccgccaggccggacatccagatgacacagagccctagcagcctgtctgccagcgtgggagacagagtgaccatcacatgcaaggccagcgaccacatcaacaactggctggcctggtatcagcagaagcctggacaggcccctaagctgctgatctacggcgctaccacactggaaacaggcgtgcccagcagattttctggcagcggctctggcaccgactacaccctgacaatatccagcctccagcctgaggacttcgccacctactactgtcagcagagctggaacaccccttggacattcggccagggcaccaagctggaaatcaagagaggcggaggcggaagtggaggcggaggatctggcggcggaggctctcaagttcagcttcaacagcctggcgctgagctggtcaaacctggcgcttctgtgaagatgagctgcaaagccagcggctacgccttcagcagctactggatcaactggatgaagcagaaacccggccagggactcgaatggatcggccaaatctatcccggcgacggcgacaccaactacaacggcaagttcaagggcagagccacactgaccgccgatacctctagcagcacagcctacatgcagctgagcagcctgaccagcgaagatagcgccgtgtacttctgtgcccggtccatcacaacagtcgtgggctgcgctatggactattggggccagggaacaagcgtgaccgtgtctagtacgcgtaaaattgaagttatgtatcctcctccttacctagacaatgagaagagcaatggaaccattatccatgtgaaaggggcgcgtctggtcccagtgttctgcggactgctggttgccaagtctctggtgctgagcgcactcctcgtttggtggggcgatatttggtggaaaacgatgatggaattgagatccctcgatacgcagaaagccacatgccaccttcagcaagtcacagacttgccttggaccagcgtcagctctcccgtggaacgggaaattctgtatcatacagtggcccgcaccaagatttccgacgatgacgacgagcacacactg

SEQ ID NO: 8870 - DNA, 1020 bp, Artificial Sequence
  Synthetic Polynucleotide
atggccttaccagtgaccgccttgctcctgccgctggccttgctgctccacgccgccaggccggacatccagatgacacagagccctagcagcctgtctgccagcgtgggagacagagtgaccatcacatgcaaggccagcgaccacatcaacaactggctggcctggtatcagcagaagcctggacaggcccctaagctgctgatctacggcgctaccacactggaaacaggcgtgcccagcagattttctggcagcggctctggcaccgactacaccctgacaatatccagcctccagcctgaggacttcgccacctactactgtcagcagagctggaacaccccttggacattcggccagggcaccaagctggaaatcaagagaggcggaggcggaagtggaggcggaggatctggcggcggaggctctcaagttcagcttcaacagcctggcgctgagctggtcaaacctggcgcttctgtgaagatgagctgcaaagccagcggctacgccttcagcagctactggatcaactggatgaagcagaaacccggccagggactcgaatggatcggccaaatctatcccggcgacggcgacaccaactacaacggcaagttcaagggcagagccacactgaccgccgatacctctagcagcacagcctacatgcagctgagcagcctgaccagcgaagatagcgccgtgtacttctgtgcccggtccatcacaacagtcgtgggctgcgctatggactattggggccagggaacaagcgtgaccgtgtctagtacgcgtaaaattgaagttatgtatcctcctccttacctagacaatgagaagagcaatggaaccattatccatgtgaaaggggcgcgtatggggcttgcattcctggtcctggtggctcttgtctggtttctggtcgaggactggctgtcccggaagagaaccagagaaagagcttccagggccagcacctgggaaggcagacgcagactgaatactcagaccctg

SEQ ID NO: 8871 - DNA, 1197 bp, Artificial Sequence
  Synthetic Polynucleotide
atggccttaccagtgaccgccttgctcctgccgctggccttgctgctccacgccgccaggccggacatccagatgacacagagccctagcagcctgtctgccagcgtgggagacagagtgaccatcacatgcaaggccagcgaccacatcaacaactggctggcctggtatcagcagaagcctggacaggcccctaagctgctgatctacggcgctaccacactggaaacaggcgtgcccagcagattttctggcagcggctctggcaccgactacaccctgacaatatccagcctccagcctgaggacttcgccacctactactgtcagcagagctggaacaccccttggacattcggccagggcaccaagctggaaatcaagagaggcggaggcggaagtggaggcggaggatctggcggcggaggctctcaagttcagcttcaacagcctggcgctgagctggtcaaacctggcgcttctgtgaagatgagctgcaaagccagcggctacgccttcagcagctactggatcaactggatgaagcagaaacccggccagggactcgaatggatcggccaaatctatcccggcgacggcgacaccaactacaacggcaagttcaagggcagagccacactgaccgccgatacctctagcagcacagcctacatgcagctgagcagcctgaccagcgaagatagcgccgtgtacttctgtgcccggtccatcacaacagtcgtgggctgcgctatggactattggggccagggaacaagcgtgaccgtgtctagtacgcgtaaaattgaagttatgtatcctcctccttacctagacaatgagaagagcaatggaaccattatccatgtgaaaggggcgcgtctgcacattctgattgggacctcagtggtcatcatcctcttcatcctcctcttctttctccttcatcgctggtgctccaacaaaaaaaatgctgcggtaatggaccaagagtctgcaggaaacagaacagcgaatagcgaggactctgatgaacaagaccctcaggaggtgacatacacacagttgaatcactgcgttttcacacagagaaaaatcactcgcccttctcagaggcccaagacacccccaacagatatcatcgtgtacacggaacttccaaatgctgagtccagatccaaagttgtctcctgccca

SEQ ID NO: 8872 - DNA, 1200 bp, Artificial Sequence
  Synthetic Polynucleotide
atggccttaccagtgaccgccttgctcctgccgctggccttgctgctccacgccgccaggccggacatccagatgacacagagccctagcagcctgtctgccagcgtgggagacagagtgaccatcacatgcaaggccagcgaccacatcaacaactggctggcctggtatcagcagaagcctggacaggcccctaagctgctgatctacggcgctaccacactggaaacaggcgtgcccagcagattttctggcagcggctctggcaccgactacaccctgacaatatccagcctccagcctgaggacttcgccacctactactgtcagcagagctggaacaccccttggacattcggccagggcaccaagctggaaatcaagagaggcggaggcggaagtggaggcggaggatctggcggcggaggctctcaagttcagcttcaacagcctggcgctgagctggtcaaacctggcgcttctgtgaagatgagctgcaaagccagcggctacgccttcagcagctactggatcaactggatgaagcagaaacccggccagggactcgaatggatcggccaaatctatcccggcgacggcgacaccaactacaacggcaagttcaagggcagagccacactgaccgccgatacctctagcagcacagcctacatgcagctgagcagcctgaccagcgaagatagcgccgtgtacttctgtgcccggtccatcacaacagtcgtgggctgcgctatggactattggggccagggaacaagcgtgaccgtgtctagtacgcgtaaaattgaagttatgtatcctcctccttacctagacaatgagaagagcaatggaaccattatccatgtgaaaggggcgcgtctgcacattctgattgggacctcagtggtcatcatcctcttcatcctcctcttctttctccttcatcgctggtgctccaacaaaaaaaatgctgcggtaatggaccaagagtctgcagggaacagaacagcgaatagcgaggactctgatgaacaagaccctcaggaggtgacatacacacagttgaatcactgcgttttcacacagagaaaaatcactcgcccttctcagaggcccaagacacccccaacagatatcatcgtgtacacggaacttccaaatgctgagtccagatccaaagttgtctcctgcccatga

SEQ ID NO: 8873 - DNA, 1173 bp, Artificial Sequence
  Synthetic Polynucleotide
atggccttaccagtgaccgccttgctcctgccgctggccttgctgctccacgccgccaggccggacatccagatgacacagagccctagcagcctgtctgccagcgtgggagacagagtgaccatcacatgcaaggccagcgaccacatcaacaactggctggcctggtatcagcagaagcctggacaggcccctaagctgctgatctacggcgctaccacactggaaacaggcgtgcccagcagattttctggcagcggctctggcaccgactacaccctgacaatatccagcctccagcctgaggacttcgccacctactactgtcagcagagctggaacaccccttggacattcggccagggcaccaagctggaaatcaagagaggcggaggcggaagtggaggcggaggatctggcggcggaggctctcaagttcagcttcaacagcctggcgctgagctggtcaaacctggcgcttctgtgaagatgagctgcaaagccagcggctacgccttcagcagctactggatcaactggatgaagcagaaacccggccagggactcgaatggatcggccaaatctatcccggcgacggcgacaccaactacaacggcaagttcaagggcagagccacactgaccgccgatacctctagcagcacagcctacatgcagctgagcagcctgaccagcgaagatagcgccgtgtacttctgtgcccggtccatcacaacagtcgtgggctgcgctatggactattggggccagggaacaagcgtgaccgtgtctagtacgcgtaaaattgaagttatgtatcctcctccttacctagacaatgagaagagcaatggaaccattatccatgtgaaaggggcgcgtgttctgattgggacctcagtggtcatcatcctcttcatcctcctcctcttctttctccttcatcgctggtgctgcaacaaaaaaaatgctgttgtaatggaccaagagcctgcagggaacagaacagtgaacagggaggactctgatgaacaagaccctcaggaggtgacatatgcacagttgaatcactgcgttttcacacagagaaaaatcactcgcccttctcagaggcccaagacacccccaacagatatcatcgtgtacacggaacttccaaatgctgagccctga

SEQ ID NO: 8874 - DNA, 1296 bp, Artificial Sequence
  Synthetic Polynucleotide
atggccttaccagtgaccgccttgctcctgccgctggccttgctgctccacgccgccaggccggacatccagatgacacagagccctagcagcctgtctgccagcgtgggagacagagtgaccatcacatgcaaggccagcgaccacatcaacaactggctggcctggtatcagcagaagcctggacaggcccctaagctgctgatctacggcgctaccacactggaaacaggcgtgcccagcagattttctggcagcggctctggcaccgactacaccctgacaatatccagcctccagcctgaggacttcgccacctactactgtcagcagagctggaacaccccttggacattcggccagggcaccaagctggaaatcaagagaggcggaggcggaagtggaggcggaggatctggcggcggaggctctcaagttcagcttcaacagcctggcgctgagctggtcaaacctggcgcttctgtgaagatgagctgcaaagccagcggctacgccttcagcagctactggatcaactggatgaagcagaaacccggccagggactcgaatggatcggccaaatctatcccggcgacggcgacaccaactacaacggcaagttcaagggcagagccacactgaccgccgatacctctagcagcacagcctacatgcagctgagcagcctgaccagcgaagatagcgccgtgtacttctgtgcccggtccatcacaacagtcgtgggctgcgctatggactattggggccagggaacaagcgtgaccgtgtctagtacgcgtaaaattgaagttatgtatcctcctccttacctagacaatgagaagagcaatggaaccattatccatgtgaaaggggcgcgtctgcacattctgattgggacctcagtggctatcatcctcttcatcatcctcttcttctttctccttcattgctgctgctccaacaaaaagaatgctgctgtaatggaccaagagcctgccggggacagaacagtgaacagggaggactctgatgatcaagaccctcaggaggtgacatatgcacagttggatcactgcgttttcacacagacaaaaatcacttccccttctcagaggcccaagacacctccaacagataccaccatgtacatggaacttccaaatgctaagccaagatcattgtctcctgcccataagcaccacagtcaggccttgaggggatcttctagggagacaacagccctgtctcaaaaccgggttgctagctcccatgtaccagcagctggaatctga

SEQ ID NO: 8875 - DNA, 1296 bp, Artificial Sequence
  Synthetic Polynucleotide
atggccttaccagtgaccgccttgctcctgccgctggccttgctgctccacgccgccaggccggacatccagatgacacagagccctagcagcctgtctgccagcgtgggagacagagtgaccatcacatgcaaggccagcgaccacatcaacaactggctggcctggtatcagcagaagcctggacaggcccctaagctgctgatctacggcgctaccacactggaaacaggcgtgcccagcagattttctggcagcggctctggcaccgactacaccctgacaatatccagcctccagcctgaggacttcgccacctactactgtcagcagagctggaacaccccttggacattcggccagggcaccaagctggaaatcaagagaggcggaggcggaagtggaggcggaggatctggcggcggaggctctcaagttcagcttcaacagcctggcgctgagctggtcaaacctggcgcttctgtgaagatgagctgcaaagccagcggctacgccttcagcagctactggatcaactggatgaagcagaaacccggccagggactcgaatggatcggccaaatctatcccggcgacggcgacaccaactacaacggcaagttcaagggcagagccacactgaccgccgatacctctagcagcacagcctacatgcagctgagcagcctgaccagcgaagatagcgccgtgtacttctgtgcccggtccatcacaacagtcgtgggctgcgctatggactattggggccagggaacaagcgtgaccgtgtctagtacgcgtaaaattgaagttatgtatcctcctccttacctagacaatgagaagagcaatggaaccattatccatgtgaaaggggcgcgtctgcacattctgattgggacctcagtggctatcatcctcttcatcatcctcttcttctttctccttcattgctgctgctccaacaaaaagaatgctgctgtaatggaccaagggcctgccggggacagaacagtgaacagggaggactctgatgatcaagaccctcaggaggtgacatatgcacagttggatcactgcgttttcacacagacaaaaatcacttccccttctcagaggcccaaggcacctccaacagataccaccatgtacatggaacttccaaatgctaagccaagatcattgtctcctgcccataagcaccacagtcaggccttgaggggatcttctagggagacaacagccctgtctcaaaaccgggttgctagctcccatgtaccagcagctggaatctga

SEQ ID NO: 8876 - DNA, 1203 bp, Artificial Sequence
  Synthetic Polynucleotide
atggccttaccagtgaccgccttgctcctgccgctggccttgctgctccacgccgccaggccggacatccagatgacacagagccctagcagcctgtctgccagcgtgggagacagagtgaccatcacatgcaaggccagcgaccacatcaacaactggctggcctggtatcagcagaagcctggacaggcccctaagctgctgatctacggcgctaccacactggaaacaggcgtgcccagcagattttctggcagcggctctggcaccgactacaccctgacaatatccagcctccagcctgaggacttcgccacctactactgtcagcagagctggaacaccccttggacattcggccagggcaccaagctggaaatcaagagaggcggaggcggaagtggaggcggaggatctggcggcggaggctctcaagttcagcttcaacagcctggcgctgagctggtcaaacctggcgcttctgtgaagatgagctgcaaagccagcggctacgccttcagcagctactggatcaactggatgaagcagaaacccggccagggactcgaatggatcggccaaatctatcccggcgacggcgacaccaactacaacggcaagttcaagggcagagccacactgaccgccgatacctctagcagcacagcctacatgcagctgagcagcctgaccagcgaagatagcgccgtgtacttctgtgcccggtccatcacaacagtcgtgggctgcgctatggactattggggccagggaacaagcgtgaccgtgtctagtacgcgtaaaattgaagttatgtatcctcctccttacctagacaatgagaagagcaatggaaccattatccatgtgaaaggggcgcgtctgcacattctgattgggacctcagtggtcatcatcctcttcatcctcctcctcttctttctccttcatctctggtgctccaacaaaaaaaatgctgctgtaatggaccaagagcctgcagggaacagaacagccaacagcgaggactctgatgaacaagaccctgaggaggtgacatacgcacagttggatcactgcgttttcacacagagaaaaatcactcgcccttctcagaggcccaagacaccccctacagataccatcttgtacacggaacttccaaatgctaagcccagatccaaagttgtctcctgcccatga

SEQ ID NO: 8877 - DNA, 1230 bp, Artificial Sequence
  Synthetic Polynucleotide
atggccttaccagtgaccgccttgctcctgccgctggccttgctgctccacgccgccaggccggacatccagatgacacagagccctagcagcctgtctgccagcgtgggagacagagtgaccatcacatgcaaggccagcgaccacatcaacaactggctggcctggtatcagcagaagcctggacaggcccctaagctgctgatctacggcgctaccacactggaaacaggcgtgcccagcagattttctggcagcggctctggcaccgactacaccctgacaatatccagcctccagcctgaggacttcgccacctactactgtcagcagagctggaacaccccttggacattcggccagggcaccaagctggaaatcaagagaggcggaggcggaagtggaggcggaggatctggcggcggaggctctcaagttcagcttcaacagcctggcgctgagctggtcaaacctggcgcttctgtgaagatgagctgcaaagccagcggctacgccttcagcagctactggatcaactggatgaagcagaaacccggccagggactcgaatggatcggccaaatctatcccggcgacggcgacaccaactacaacggcaagttcaagggcagagccacactgaccgccgatacctctagcagcacagcctacatgcagctgagcagcctgaccagcgaagatagcgccgtgtacttctgtgcccggtccatcacaacagtcgtgggctgcgctatggactattggggccagggaacaagcgtgaccgtgtctagtacgcgtaaaattgaagttatgtatcctcctccttacctagacaatgagaagagcaatggaaccattatccatgtgaaaggggcgcgtgttctgattgggacctcagtggtcatcttcctcttcatcctcctcctcttctttctcctttatcgctggtgctccaacaaaaagaatgctgctgtaatggaccaagagcctgcgggggacagaacagtgaataggcaggactctgatgaacaagaccctcaggaggtgacgtacgcacagttggatcactgcgttttcatacagagaaaaatcagtcgcccttctcagaggcccaagacacccctaacagataccagcgtgtacacggaacttccaaatgctgagcccagatccaaagttgtctcctgcccacgagcaccacagtcaggtcttgagggggttttctag

SEQ ID NO: 8878 - DNA, 1230 bp, Artificial Sequence; identical to SEQ ID NO: 8877
  Synthetic Polynucleotide

SEQ ID NO: 8879 - DNA, 1146 bp, Artificial Sequence
  Synthetic Polynucleotide
atggccttaccagtgaccgccttgctcctgccgctggccttgctgctccacgccgccaggccggacatccagatgacacagagccctagcagcctgtctgccagcgtgggagacagagtgaccatcacatgcaaggccagcgaccacatcaacaactggctggcctggtatcagcagaagcctggacaggcccctaagctgctgatctacggcgctaccacactggaaacaggcgtgcccagcagattttctggcagcggctctggcaccgactacaccctgacaatatccagcctccagcctgaggacttcgccacctactactgtcagcagagctggaacaccccttggacattcggccagggcaccaagctggaaatcaagagaggcggaggcggaagtggaggcggaggatctggcggcggaggctctcaagttcagcttcaacagcctggcgctgagctggtcaaacctggcgcttctgtgaagatgagctgcaaagccagcggctacgccttcagcagctactggatcaactggatgaagcagaaacccggccagggactcgaatggatcggccaaatctatcccggcgacggcgacaccaactacaacggcaagttcaagggcagagccacactgaccgccgatacctctagcagcacagcctacatgcagctgagcagcctgaccagcgaagatagcgccgtgtacttctgtgcccggtccatcacaacagtcgtgggctgcgctatggactattggggccagggaacaagcgtgaccgtgtctagtacgcgtaaaattgaagttatgtatcctcctccttacctagacaatgagaagagcaatggaaccattatccatgtgaaaggggcgcgtcacgttctgattgggacctcagtggtcatcatcccctttgctatcctcctcttctttctccttcatcgctggtgtgccaacaaaaagaatgctgttgtaatggaccaagagcctgcagggaacagaacagtgaacagggaggactctgatgaacaagaccctcaggaggtgacatacgcacagttgaatcactgcgttttcacacagagaaaaatcactcgcccttctcagaggcccaagacacccccaacagataccagcgtg

SEQ ID NO: 8880 - DNA, 1290 bp, Artificial Sequence
  Synthetic Polynucleotide
atggccttaccagtgaccgccttgctcctgccgctggccttgctgctccacgccgccaggccggacatccagatgacacagagccctagcagcctgtctgccagcgtgggagacagagtgaccatcacatgcaaggccagcgaccacatcaacaactggctggcctggtatcagcagaagcctggacaggcccctaagctgctgatctacggcgctaccacactggaaacaggcgtgcccagcagattttctggcagcggctctggcaccgactacaccctgacaatatccagcctccagcctgaggacttcgccacctactactgtcagcagagctggaacaccccttggacattcggccagggcaccaagctggaaatcaagagaggcggaggcggaagtggaggcggaggatctggcggcggaggctctcaagttcagcttcaacagcctggcgctgagctggtcaaacctggcgcttctgtgaagatgagctgcaaagccagcggctacgccttcagcagctactggatcaactggatgaagcagaaacccggccagggactcgaatggatcggccaaatctatcccggcgacggcgacaccaactacaacggcaagttcaagggcagagccacactgaccgccgatacctctagcagcacagcctacatgcagctgagcagcctgaccagcgaagatagcgccgtgtacttctgtgcccggtccatcacaacagtcgtgggctgcgctatggactattggggccagggaacaagcgtgaccgtgtctagtacgcgtaaaattgaagttatgtatcctcctccttacctagacaatgagaagagcaatggaaccattatccatgtgaaaggggcgcgtgctgtgattaggtactcagtggccatcatcctctttaccatccttcccttctttctccttcatcgctggtgctccaaaaaaaaaaatgctgctgtaatgaaccaagagcctgcgggacacagaacagtgaacagggaggactctgatgaacaagaccctcaggaggtgacatacgcacagttggatcactgcattttcacacagagaaaaatcactggcccttctcagaggagcaagagaccctcaacagataccagcgtgtgtatagaacttccaaatgctgagcccagagcgttgtctcctgcccatgagcaccacagtcaggccttgatgggatcttctagggagacaacagccctgtctcaaacccagcttgccagctctaatgtaccagcagctggaatctga

SEQ ID NO: 8881 - DNA, 978 bp, Artificial Sequence
  Synthetic Polynucleotide
atggccttaccagtgaccgccttgctcctgccgctggccttgctgctccacgccgccaggccggacatccagatgacacagagccctagcagcctgtctgccagcgtgggagacagagtgaccatcacatgcaaggccagcgaccacatcaacaactggctggcctggtatcagcagaagcctggacaggcccctaagctgctgatctacggcgctaccacactggaaacaggcgtgcccagcagattttctggcagcggctctggcaccgactacaccctgacaatatccagcctccagcctgaggacttcgccacctactactgtcagcagagctggaacaccccttggacattcggccagggcaccaagctggaaatcaagagaggcggaggcggaagtggaggcggaggatctggcggcggaggctctcaagttcagcttcaacagcctggcgctgagctggtcaaacctggcgcttctgtgaagatgagctgcaaagccagcggctacgccttcagcagctactggatcaactggatgaagcagaaacccggccagggactcgaatggatcggccaaatctatcccggcgacggcgacaccaactacaacggcaagttcaagggcagagccacactgaccgccgatacctctagcagcacagcctacatgcagctgagcagcctgaccagcgaagatagcgccgtgtacttctgtgcccggtccatcacaacagtcgtgggctgcgctatggactattggggccagggaacaagcgtgaccgtgtctagtacgcgtaaaattgaagttatgtatcctcctccttacctagacaatgagaagagcaatggaaccattatccatgtgaaaggggcgcgtgctgtgattaggtactcagtggccatcatcctctttaccatccttcccttctttctccttcatcgctggtgctccaaaaaaaaaatgctgctgtaa

SEQ ID NO: 8882 - DNA, 1059 bp, Artificial Sequence
  Synthetic Polynucleotide
atggccttaccagtgaccgccttgctcctgccgctggccttgctgctccacgccgccaggccggacatccagatgacacagagccctagcagcctgtctgccagcgtgggagacagagtgaccatcacatgcaaggccagcgaccacatcaacaactggctggcctggtatcagcagaagcctggacaggcccctaagctgctgatctacggcgctaccacactggaaacaggcgtgcccagcagattttctggcagcggctctggcaccgactacaccctgacaatatccagcctccagcctgaggacttcgccacctactactgtcagcagagctggaacaccccttggacattcggccagggcaccaagctggaaatcaagagaggcggaggcggaagtggaggcggaggatctggcggcggaggctctcaagttcagcttcaacagcctggcgctgagctggtcaaacctggcgcttctgtgaagatgagctgcaaagccagcggctacgccttcagcagctactggatcaactggatgaagcagaaacccggccagggactcgaatggatcggccaaatctatcccggcgacggcgacaccaactacaacggcaagttcaagggcagagccacactgaccgccgatacctctagcagcacagcctacatgcagctgagcagcctgaccagcgaagatagcgccgtgtacttctgtgcccggtccatcacaacagtcgtgggctgcgctatggactattggggccagggaacaagcgtgaccgtgtctagtacgcgtaaaattgaagttatgtatcctcctccttacctagacaatgagaagagcaatggaaccattatccatgtgaaaggggcgcgtgttctgattgggacctcagtggtcaaaatccctttcaccatcctcctcttctttctccttcatcgctggtgctccgacaaaaaaaatgctgctgtaatggaccaagagcctgcagggaacagaacagtgaacagcgaggattctgatgaacaagaccatcaggaggtgtcatacgca

SEQ ID NO: 8883 - DNA, 1059 bp, Artificial Sequence
  Synthetic Polynucleotide
atggccttaccagtgaccgccttgctcctgccgctggccttgctgctccacgccgccaggccggacatccagatgacacagagccctagcagcctgtctgccagcgtgggagacagagtgaccatcacatgcaaggccagcgaccacatcaacaactggctggcctggtatcagcagaagcctggacaggcccctaagctgctgatctacggcgctaccacactggaaacaggcgtgcccagcagattttctggcagcggctctggcaccgactacaccctgacaatatccagcctccagcctgaggacttcgccacctactactgtcagcagagctggaacaccccttggacattcggccagggcaccaagctggaaatcaagagaggcggaggcggaagtggaggcggaggatctggcggcggaggctctcaagttcagcttcaacagcctggcgctgagctggtcaaacctggcgcttctgtgaagatgagctgcaaagccagcggctacgccttcagcagctactggatcaactggatgaagcagaaacccggccagggactcgaatggatcggccaaatctatcccggcgacggcgacaccaactacaacggcaagttcaagggcagagccacactgaccgccgatacctctagcagcacagcctacatgcagctgagcagcctgaccagcgaagatagcgccgtgtacttctgtgcccggtccatcacaacagtcgtgggctgcgctatggactattggggccagggaacaagcgtgaccgtgtctagtacgcgtaaaattgaagttatgtatcctcctccttacctagacaatgagaagagcaatggaaccattatccatgtgaaaggggcgcgtgttctgattgggacctcagtggtcaaaatccctttcaccatcctcctcttctttctccttcatcgctggtgctccaacaaaaaaaatgctgctgtaatggaccaagagcctgcagggaacagaacagtgaacagcgaggattctgatgaacaagaccatcaggaggtgtcatacgca

SEQ ID NO: 8884 - DNA, 1059 bp, Artificial Sequence
  Synthetic Polynucleotide
atggccttaccagtgaccgccttgctcctgccgctggccttgctgctccacgccgccaggccggacatccagatgacacagagccctagcagcctgtctgccagcgtgggagacagagtgaccatcacatgcaaggccagcgaccacatcaacaactggctggcctggtatcagcagaagcctggacaggcccctaagctgctgatctacggcgctaccacactggaaacaggcgtgcccagcagattttctggcagcggctctggcaccgactacaccctgacaatatccagcctccagcctgaggacttcgccacctactactgtcagcagagctggaacaccccttggacattcggccagggcaccaagctggaaatcaagagaggcggaggcggaagtggaggcggaggatctggcggcggaggctctcaagttcagcttcaacagcctggcgctgagctggtcaaacctggcgcttctgtgaagatgagctgcaaagccagcggctacgccttcagcagctactggatcaactggatgaagcagaaacccggccagggactcgaatggatcggccaaatctatcccggcgacggcgacaccaactacaacggcaagttcaagggcagagccacactgaccgccgatacctctagcagcacagcctacatgcagctgagcagcctgaccagcgaagatagcgccgtgtacttctgtgcccggtccatcacaacagtcgtgggctgcgctatggactattggggccagggaacaagcgtgaccgtgtctagtacgcgtaaaattgaagttatgtatcctcctccttacctagacaatgagaagagcaatggaaccattatccatgtgaaaggggcgcgtgttctgattgggacctcagtggtcaaactccctttcaccatcctcctcttctttctccttcatcgctggtgctccgacaaaaaaaatgcatctgtaatggaccaagggcctgcggggaacagaacagtgaacagggaggattctgacgaacaggaccatcaggaggtgtcatacgca

SEQ ID NO: 8885 - DNA, 1071 bp, Artificial Sequence
  Synthetic Polynucleotide
atggccttaccagtgaccgccttgctcctgccgctggccttgctgctccacgccgccaggccggacatccagatgacacagagccctagcagcctgtctgccagcgtgggagacagagtgaccatcacatgcaaggccagcgaccacatcaacaactggctggcctggtatcagcagaagcctggacaggcccctaagctgctgatctacggcgctaccacactggaaacaggcgtgcccagcagattttctggcagcggctctggcaccgactacaccctgacaatatccagcctccagcctgaggacttcgccacctactactgtcagcagagctggaacaccccttggacattcggccagggcaccaagctggaaatcaagagaggcggaggcggaagtggaggcggaggatctggcggcggaggctctcaagttcagcttcaacagcctggcgctgagctggtcaaacctggcgcttctgtgaagatgagctgcaaagccagcggctacgccttcagcagctactggatcaactggatgaagcagaaacccggccagggactcgaatggatcggccaaatctatcccggcgacggcgacaccaactacaacggcaagttcaagggcagagccacactgaccgccgatacctctagcagcacagcctacatgcagctgagcagcctgaccagcgaagatagcgccgtgtacttctgtgcccggtccatcacaacagtcgtgggctgcgctatggactattggggccagggaacaagcgtgaccgtgtctagtacgcgtaaaattgaagttatgtatcctcctccttacctagacaatgagaagagcaatggaaccattatccatgtgaaaggggcgcgtctgcacgtgctgatcggaaccagcgtggtcaagatcccctttacaatcctgctgttctttctgctccatcggcatcggtggtgcagcgacaagaaaaacgccgccgtgatggaccaagagcctgccggcaatagaaccgtgaacagcgaggatagcgacgagcaggaccaccaagaggtgtcctatgct

SEQ ID NO: 8886 - DNA, 1062 bp, Artificial Sequence
  Synthetic Polynucleotide
atggccttaccagtgaccgccttgctcctgccgctggccttgctgctccacgccgccaggccggacatccagatgacacagagccctagcagcctgtctgccagcgtgggagacagagtgaccatcacatgcaaggccagcgaccacatcaacaactggctggcctggtatcagcagaagcctggacaggcccctaagctgctgatctacggcgctaccacactggaaacaggcgtgcccagcagattttctggcagcggctctggcaccgactacaccctgacaatatccagcctccagcctgaggacttcgccacctactactgtcagcagagctggaacaccccttggacattcggccagggcaccaagctggaaatcaagagaggcggaggcggaagtggaggcggaggatctggcggcggaggctctcaagttcagcttcaacagcctggcgctgagctggtcaaacctggcgcttctgtgaagatgagctgcaaagccagcggctacgccttcagcagctactggatcaactggatgaagcagaaacccggccagggactcgaatggatcggccaaatctatcccggcgacggcgacaccaactacaacggcaagttcaagggcagagccacactgaccgccgatacctctagcagcacagcctacatgcagctgagcagcctgaccagcgaagatagcgccgtgtacttctgtgcccggtccatcacaacagtcgtgggctgcgctatggactattggggccagggaacaagcgtgaccgtgtctagtacgcgtaaaattgaagttatgtatcctcctccttacctagacaatgagaagagcaatggaaccattatccatgtgaaaggggcgcgtgttctgattgggacctcagtggtcaaactccctttcaccatcctcctcttctttctccttcatcgctggtgctccaacaaaaaaaatgcatctgtaatggaccaagggcctgcggggaacagaacagtgaacagggaggattctgatgaacaggaccatcaggaggtgtcatacgcataa

SEQ ID NO: 8887 - DNA, 1014 bp, Artificial Sequence
  Synthetic Polynucleotide
atggccttaccagtgaccgccttgctcctgccgctggccttgctgctccacgccgccaggccggacatccagatgacacagagccctagcagcctgtctgccagcgtgggagacagagtgaccatcacatgcaaggccagcgaccacatcaacaactggctggcctggtatcagcagaagcctggacaggcccctaagctgctgatctacggcgctaccacactggaaacaggcgtgcccagcagattttctggcagcggctctggcaccgactacaccctgacaatatccagcctccagcctgaggacttcgccacctactactgtcagcagagctggaacaccccttggacattcggccagggcaccaagctggaaatcaagagaggcggaggcggaagtggaggcggaggatctggcggcggaggctctcaagttcagcttcaacagcctggcgctgagctggtcaaacctggcgcttctgtgaagatgagctgcaaagccagcggctacgccttcagcagctactggatcaactggatgaagcagaaacccggccagggactcgaatggatcggccaaatctatcccggcgacggcgacaccaactacaacggcaagttcaagggcagagccacactgaccgccgatacctctagcagcacagcctacatgcagctgagcagcctgaccagcgaagatagcgccgtgtacttctgtgcccggtccatcacaacagtcgtgggctgcgctatggactattggggccagggaacaagcgtgaccgtgtctagtacgcgtaaaattgaagttatgtatcctcctccttacctagacaatgagaagagcaatggaaccattatccatgtgaaaggggcgcgtctgcacattctgattgggacctcagtggtcaaaatccctttcaccatcctcctcttctttctccttcatcgctggtgctccaacaaaaaaaaatgctgctgtaatggaccaagagcctgcagggaacagaag

SEQ ID NO: 8888 - DNA, 1203 bp, Artificial Sequence
  Synthetic Polynucleotide
atggccttaccagtgaccgccttgctcctgccgctggccttgctgctccacgccgccaggccggacatccagatgacacagagccctagcagcctgtctgccagcgtgggagacagagtgaccatcacatgcaaggccagcgaccacatcaacaactggctggcctggtatcagcagaagcctggacaggcccctaagctgctgatctacggcgctaccacactggaaacaggcgtgcccagcagattttctggcagcggctctggcaccgactacaccctgacaatatccagcctccagcctgaggacttcgccacctactactgtcagcagagctggaacaccccttggacattcggccagggcaccaagctggaaatcaagagaggcggaggcggaagtggaggcggaggatctggcggcggaggctctcaagttcagcttcaacagcctggcgctgagctggtcaaacctggcgcttctgtgaagatgagctgcaaagccagcggctacgccttcagcagctactggatcaactggatgaagcagaaacccggccagggactcgaatggatcggccaaatctatcccggcgacggcgacaccaactacaacggcaagttcaagggcagagccacactgaccgccgatacctctagcagcacagcctacatgcagctgagcagcctgaccagcgaagatagcgccgtgtacttctgtgcccggtccatcacaacagtcgtgggctgcgctatggactattggggccagggaacaagcgtgaccgtgtctagtacgcgtaaaattgaagttatgtatcctcctccttacctagacaatgagaagagcaatggaaccattatccatgtgaaaggggcgcgtatcctgctgctcacgctggtgtccttcctcattttcatactcttcatcatagtccagctcttcatcatgaagctgaggaaagcacatgtgatatggaagaaagaaaacgaagtttcagaacacacactagaaagttacagatcaaggtcaaataatgaagaaacatcatctgaagagaaaaatggccaatcttcccaccctatgcgttgcatgaactacatcacaaagttgtactcagaagcaaaaacaaagaggaaggaaaatgtacaacattcaaaattagaagaaaagcacatccaagtaccagagagtattgtgtag

SEQ ID NO: 8889 - DNA, 1194 bp, Artificial Sequence
  Synthetic Polynucleotide
atggccttaccagtgaccgccttgctcctgccgctggccttgctgctccacgccgccaggccggacatccagatgacacagagccctagcagcctgtctgccagcgtgggagacagagtgaccatcacatgcaaggccagcgaccacatcaacaactggctggcctggtatcagcagaagcctggacaggcccctaagctgctgatctacggcgctaccacactggaaacaggcgtgcccagcagattttctggcagcggctctggcaccgactacaccctgacaatatccagcctccagcctgaggacttcgccacctactactgtcagcagagctggaacaccccttggacattcggccagggcaccaagctggaaatcaagagaggcggaggcggaagtggaggcggaggatctggcggcggaggctctcaagttcagcttcaacagcctggcgctgagctggtcaaacctggcgcttctgtgaagatgagctgcaaagccagcggctacgccttcagcagctactggatcaactggatgaagcagaaacccggccagggactcgaatggatcggccaaatctatcccggcgacggcgacaccaactacaacggcaagttcaagggcagagccacactgaccgccgatacctctagcagcacagcctacatgcagctgagcagcctgaccagcgaagatagcgccgtgtacttctgtgcccggtccatcacaacagtcgtgggctgcgctatggactattggggccagggaacaagcgtgaccgtgtctagtacgcgtaaaattgaagttatgtatcctcctccttacctagacaatgagaagagcaatggaaccattatccatgtgaaaggggcgcgtttgcttggagccatggccgcgacgctggtggtcatctgcacagcagtcatcgtggtggtcgcgttgactagaaagaagaaagccctcagaatccattctgtggaaggtgacctcaggagaaaatcagctggacaggaggaatggagccccagtgctccctcacccccaggaagctgtgtccaggcagaagctgcacctgctgggctctgtggagagcagcggggagaggactgtgccgagctgcatgactacttcaatgtcctgagttacagaagcctgggtaactgcagcttcttcacagagactggttag

SEQ ID NO: 8890 - DNA, 1251 bp, Artificial Sequence; identical to SEQ ID NO: 8829
  Synthetic Polynucleotide

SEQ ID NO: 8891 - DNA, 1209 bp, Artificial Sequence
  Synthetic Polynucleotide
atggccttaccagtgaccgccttgctcctgccgctggccttgctgctccacgccgccaggccggacatccagatgacacagagccctagcagcctgtctgccagcgtgggagacagagtgaccatcacatgcaaggccagcgaccacatcaacaactggctggcctggtatcagcagaagcctggacaggcccctaagctgctgatctacggcgctaccacactggaaacaggcgtgcccagcagattttctggcagcggctctggcaccgactacaccctgacaatatccagcctccagcctgaggacttcgccacctactactgtcagcagagctggaacaccccttggacattcggccagggcaccaagctggaaatcaagagaggcggaggcggaagtggaggcggaggatctggcggcggaggctctcaagttcagcttcaacagcctggcgctgagctggtcaaacctggcgcttctgtgaagatgagctgcaaagccagcggctacgccttcagcagctactggatcaactggatgaagcagaaacccggccagggactcgaatggatcggccaaatctatcccggcgacggcgacaccaactacaacggcaagttcaagggcagagccacactgaccgccgatacctctagcagcacagcctacatgcagctgagcagcctgaccagcgaagatagcgccgtgtacttctgtgcccggtccatcacaacagtcgtgggctgcgctatggactattggggccagggaacaagcgtgaccgtgtctagtacgcgtaaaattgaagttatgtatcctcctccttacctagacaatgagaagagcaatggaaccattatccatgtgaaaggggcgcgtgtcctcctgtgtctcctgttggtgcccctcctgctcagtctctttgtactggggctatttctttggtttctgaagagagagagacaagaagagtacattgaagagaagaagagagtggacatttgtcgggaaactcctaacatatgcccccattctggagagaacacagagtacgacacaatccctcacactaatagaacaatcctaaaggaagatccagcaaatacggtttactccactgtggaaataccgaaaaagatggaaaatccccactcactgctcacgatgccagacacaccaaggctatttgcctatgagaatgttatc

SEQ ID NO: 8892 - DNA, 1092 bp, Artificial Sequence
  Synthetic Polynucleotide
atggccttaccagtgaccgccttgctcctgccgctggccttgctgctccacgccgccaggccggacatccagatgacacagagccctagcagcctgtctgccagcgtgggagacagagtgaccatcacatgcaaggccagcgaccacatcaacaactggctggcctggtatcagcagaagcctggacaggcccctaagctgctgatctacggcgctaccacactggaaacaggcgtgcccagcagattttctggcagcggctctggcaccgactacaccctgacaatatccagcctccagcctgaggacttcgccacctactactgtcagcagagctggaacaccccttggacattcggccagggcaccaagctggaaatcaagagaggcggaggcggaagtggaggcggaggatctggcggcggaggctctcaagttcagcttcaacagcctggcgctgagctggtcaaacctggcgcttctgtgaagatgagctgcaaagccagcggctacgccttcagcagctactggatcaactggatgaagcagaaacccggccagggactcgaatggatcggccaaatctatcccggcgacggcgacaccaactacaacggcaagttcaagggcagagccacactgaccgccgatacctctagcagcacagcctacatgcagctgagcagcctgaccagcgaagatagcgccgtgtacttctgtgcccggtccatcacaacagtcgtgggctgcgctatggactattggggccagggaacaagcgtgaccgtgtctagtacgcgtaaaattgaagttatgtatcctcctccttacctagacaatgagaagagcaatggaaccattatccatgtgaaaggggcgcgtatccttgtgatcttctctggaatgttccttgttttcaccctggccggggccctgttcctccatcaacgaaggaaatatagatcaaacaaaggagaaagtcctgtggagcctgcagagccttgtcattacagctgccccagggaggaggagggcagcaccatccccatccaggaggattaccgaaaaccggagcctgcctgctccccctga

SEQ ID NO: 8893 - DNA, 1251 bp, Artificial Sequence
  Synthetic Polynucleotide
atggccttaccagtgaccgccttgctcctgccgctggccttgctgctccacgccgccaggccggacatccagatgacacagagccctagcagcctgtctgccagcgtgggagacagagtgaccatcacatgcaaggccagcgaccacatcaacaactggctggcctggtatcagcagaagcctggacaggcccctaagctgctgatctacggcgctaccacactggaaacaggcgtgcccagcagattttctggcagcggctctggcaccgactacaccctgacaatatccagcctccagcctgaggacttcgccacctactactgtcagcagagctggaacaccccttggacattcggccagggcaccaagctggaaatcaagagaggcggaggcggaagtggaggcggaggatctggcggcggaggctctcaagttcagcttcaacagcctggcgctgagctggtcaaacctggcgcttctgtgaagatgagctgcaaagccagcggctacgccttcagcagctactggatcaactggatgaagcagaaacccggccagggactcgaatggatcggccaaatctatcccggcgacggcgacaccaactacaacggcaagttcaagggcagagccacactgaccgccgatacctctagcagcacagcctacatgcagctgagcagcctgaccagcgaagatagcgccgtgtacttctgtgcccggtccatcacaacagtcgtgggctgcgctatggactattggggccagggaacaagcgtgaccgtgtctagtacgcgtaaaattgaagttatgtatcctcctccttacctagacaatgagaagagcaatggaaccattatccatgtgaaaggggcgcgtattctcatcggggtctcagtggtcttcctcttctgtctcctcctcctggtcctcttctgcctccatcgccagaatcagataaagcaggggccccccagaagcaaggacgaggagcagaagccacagcagaggcctgacctggctgttgatgttctagagaggacagcagacaaggccacagtcaatggacttcctgagaaggacagagagacggacacctcggccctggctgcagggagttcccaggaggtgacgtatgctcagctggaccactgggccctcacacagaggacagcccgggctgtgtccccacagtccacaaagcccatggccgagtccatcacgtatgcagccgttgccagacactga

SEQ ID NO: 8894 - DNA, 1464 bp, Artificial Sequence
  Synthetic Polynucleotide
atggccttaccagtgaccgccttgctcctgccgctggccttgctgctccacgccgccaggccggacatccagatgacacagagccctagcagcctgtctgccagcgtgggagacagagtgaccatcacatgcaaggccagcgaccacatcaacaactggctggcctggtatcagcagaagcctggacaggcccctaagctgctgatctacggcgctaccacactggaaacaggcgtgcccagcagattttctggcagcggctctggcaccgactacaccctgacaatatccagcctccagcctgaggacttcgccacctactactgtcagcagagctggaacaccccttggacattcggccagggcaccaagctggaaatcaagagaggcggaggcggaagtggaggcggaggatctggcggcggaggctctcaagttcagcttcaacagcctggcgctgagctggtcaaacctggcgcttctgtgaagatgagctgcaaagccagcggctacgccttcagcagctactggatcaactggatgaagcagaaacccggccagggactcgaatggatcggccaaatctatcccggcgacggcgacaccaactacaacggcaagttcaagggcagagccacactgaccgccgatacctctagcagcacagcctacatgcagctgagcagcctgaccagcgaagatagcgccgtgtacttctgtgcccggtccatcacaacagtcgtgggctgcgctatggactattggggccagggaacaagcgtgaccgtgtctagtacgcgtaaaattgaagttatgtatcctcctccttacctagacaatgagaagagcaatggaaccattatccatgtgaaaggggcgcgtctgggggttgtgatcggcatcttggtggccgtcatcctactgctcctcctcctcctcctcctcttcctcatcctccgacatcgacgtcagggcaaacactggacatcgacccagagaaaggctgatttccaacatcctgcaggggctgtggggccagagcccacagacagaggcctgcagtggaggtccagcccagctgccgatgcccaggaagaaaacctctatgctgccgtgaagcacacacagcctgaggatggggtggagatggacactcggcagagcccacacgatgaagacccccaggcagtgacgtatgccgaggtgaaacactccagacctaggagagaaatggcctctcctccttccccactgtctggggaattcctggacacaaaggacagacaggcggaagaggacaggcagatggacactgaggctgctgcatctgaagccccccaggatgtgacctacgcccagctgcacagcttgaccctcagacgggaggcaactgagcctcctccatcccaggaagggccctctccagctgtgcccagcatctacgccactctggccatccactag

SEQ ID NO: 8895 - DNA, 1089 bp, Artificial Sequence
  Synthetic Polynucleotide
atggccttaccagtgaccgccttgctcctgccgctggccttgctgctccacgccgccaggccggacatccagatgacacagagccctagcagcctgtctgccagcgtgggagacagagtgaccatcacatgcaaggccagcgaccacatcaacaactggctggcctggtatcagcagaagcctggacaggcccctaagctgctgatctacggcgctaccacactggaaacaggcgtgcccagcagattttctggcagcggctctggcaccgactacaccctgacaatatccagcctccagcctgaggacttcgccacctactactgtcagcagagctggaacaccccttggacattcggccagggcaccaagctggaaatcaagagaggcggaggcggaagtggaggcggaggatctggcggcggaggctctcaagttcagcttcaacagcctggcgctgagctggtcaaacctggcgcttctgtgaagatgagctgcaaagccagcggctacgccttcagcagctactggatcaactggatgaagcagaaacccggccagggactcgaatggatcggccaaatctatcccggcgacggcgacaccaactacaacggcaagttcaagggcagagccacactgaccgccgatacctctagcagcacagcctacatgcagctgagcagcctgaccagcgaagatagcgccgtgtacttctgtgcccggtccatcacaacagtcgtgggctgcgctatggactattggggccagggaacaagcgtgaccgtgtctagtacgcgtaaaattgaagttatgtatcctcctccttacctagacaatgagaagagcaatggaaccattatccatgtgaaaggggcgcgtatcatctcattttttctcgctctcacatcaaccgctttgctgttcctgctcttttttctcaccctccggttctccgtggttaagagaggccggaaaaaactcctctatatctttaaacagccctttatgcgcccggtccaaacaacccaagaggaagatggctgctcttgcagattcccggaagaggaagaaggcggctgcgagctg

SEQ ID NO: 8896 - DNA, 1086 bp, Artificial Sequence
  Synthetic Polynucleotide
atggccttaccagtgaccgccttgctcctgccgctggccttgctgctccacgccgccaggccggacatccagatgacacagagccctagcagcctgtctgccagcgtgggagacagagtgaccatcacatgcaaggccagcgaccacatcaacaactggctggcctggtatcagcagaagcctggacaggcccctaagctgctgatctacggcgctaccacactggaaacaggcgtgcccagcagattttctggcagcggctctggcaccgactacaccctgacaatatccagcctccagcctgaggacttcgccacctactactgtcagcagagctggaacaccccttggacattcggccagggcaccaagctggaaatcaagagaggcggaggcggaagtggaggcggaggatctggcggcggaggctctcaagttcagcttcaacagcctggcgctgagctggtcaaacctggcgcttctgtgaagatgagctgcaaagccagcggctacgccttcagcagctactggatcaactggatgaagcagaaacccggccagggactcgaatggatcggccaaatctatcccggcgacggcgacaccaactacaacggcaagttcaagggcagagccacactgaccgccgatacctctagcagcacagcctacatgcagctgagcagcctgaccagcgaagatagcgccgtgtacttctgtgcccggtccatcacaacagtcgtgggctgcgctatggactattggggccagggaacaagcgtgaccgtgtctagtacgcgtaaaattgaagttatgtatcctcctccttacctagacaatgagaagagcaatggaaccattatccatgtgaaaggggcgcgtttttgggttctcgtcgtcgtcggcggagtcctggcttgttattctctgcttgtgacagtcgcctttatcatattctgggtccgctccaagagaagcagactgctccactccgattatatgaatatgacacccaggcggccagggcctacacggaaacactatcaaccctacgctccacctcgggatttcgctgcctacagatca

SEQ ID NO: 8897 - DNA, 1071 bp, Artificial Sequence
  Synthetic Polynucleotide
atggccttaccagtgaccgccttgctcctgccgctggccttgctgctccacgccgccaggccggacatccagatgacacagagccctagcagcctgtctgccagcgtgggagacagagtgaccatcacatgcaaggccagcgaccacatcaacaactggctggcctggtatcagcagaagcctggacaggcccctaagctgctgatctacggcgctaccacactggaaacaggcgtgcccagcagattttctggcagcggctctggcaccgactacaccctgacaatatccagcctccagcctgaggacttcgccacctactactgtcagcagagctggaacaccccttggacattcggccagggcaccaagctggaaatcaagagaggcggaggcggaagtggaggcggaggatctggcggcggaggctctcaagttcagcttcaacagcctggcgctgagctggtcaaacctggcgcttctgtgaagatgagctgcaaagccagcggctacgccttcagcagctactggatcaactggatgaagcagaaacccggccagggactcgaatggatcggccaaatctatcccggcgacggcgacaccaactacaacggcaagttcaagggcagagccacactgaccgccgatacctctagcagcacagcctacatgcagctgagcagcctgaccagcgaagatagcgccgtgtacttctgtgcccggtccatcacaacagtcgtgggctgcgctatggactattggggccagggaacaagcgtgaccgtgtctagtacgcgtaaaattgaagttatgtatcctcctccttacctagacaatgagaagagcaatggaaccattatccatgtgaaaggggcgcgtgtggctgctatccttggattgggcctcgttctcggactgttgggaccacttgcaatcctgctggctctctatctgctgcggcgggatcagagactccctccagatgctcataagccacctggcggcggatctttcaggaccccaattcaagaagaacaagccgacgctcactctaccctggctaagatc

SEQ ID NO: 8898 - DNA, 1323 bp, Artificial Sequence
  Synthetic Polynucleotide
atggccttaccagtgaccgccttgctcctgccgctggccttgctgctccacgccgccaggccggacatccagatgacacagagccctagcagcctgtctgccagcgtgggagacagagtgaccatcacatgcaaggccagcgaccacatcaacaactggctggcctggtatcagcagaagcctggacaggcccctaagctgctgatctacggcgctaccacactggaaacaggcgtgcccagcagattttctggcagcggctctggcaccgactacaccctgacaatatccagcctccagcctgaggacttcgccacctactactgtcagcagagctggaacaccccttggacattcggccagggcaccaagctggaaatcaagagaggcggaggcggaagtggaggcggaggatctggcggcggaggctctcaagttcagcttcaacagcctggcgctgagctggtcaaacctggcgcttctgtgaagatgagctgcaaagccagcggctacgccttcagcagctactggatcaactggatgaagcagaaacccggccagggactcgaatggatcggccaaatctatcccggcgacggcgacaccaactacaacggcaagttcaagggcagagccacactgaccgccgatacctctagcagcacagcctacatgcagctgagcagcctgaccagcgaagatagcgccgtgtacttctgtgcccggtccatcacaacagtcgtgggctgcgctatggactattggggccagggaacaagcgtgaccgtgtctagtacgcgtaaaattgaagttatgtatcctcctccttacctagacaatgagaagagcaatggaaccattatccatgtgaaaggggcgcgtttttgggttctcgtcgtcgtcggcggagtcctggcttgttattctctgcttgtgacagtcgcctttatcatattctgggtctggcggcgcaaacggaaagagaaacagtctgagacttccccgaaagagtttctcacgatatacgaagatgtcaaggacctcaagacccgccgcaaccatgagcaagaacagacattcccaggcggaggctccacaatctactccatgattcagtcccagtctagcgccccaacctctcaagagcctgcttataccctgtacagtctgattcagccctccagaaagtccggctctcggaagaggaaccactctcctagcttcaactccaccatatatgaagtcattggcaagtctcagcccaaagcacagaatcctgccaggctgagcagaaaagaacttgagaatttcgacgtctactcc

SEQ ID NO: 8899 - DNA, 1161 bp, Artificial Sequence
  Synthetic Polynucleotide
atggccttaccagtgaccgccttgctcctgccgctggccttgctgctccacgccgccaggccggacatccagatgacacagagccctagcagcctgtctgccagcgtgggagacagagtgaccatcacatgcaaggccagcgaccacatcaacaactggctggcctggtatcagcagaagcctggacaggcccctaagctgctgatctacggcgctaccacactggaaacaggcgtgcccagcagattttctggcagcggctctggcaccgactacaccctgacaatatccagcctccagcctgaggacttcgccacctactactgtcagcagagctggaacaccccttggacattcggccagggcaccaagctggaaatcaagagaggcggaggcggaagtggaggcggaggatctggcggcggaggctctcaagttcagcttcaacagcctggcgctgagctggtcaaacctggcgcttctgtgaagatgagctgcaaagccagcggctacgccttcagcagctactggatcaactggatgaagcagaaacccggccagggactcgaatggatcggccaaatctatcccggcgacggcgacaccaactacaacggcaagttcaagggcagagccacactgaccgccgatacctctagcagcacagcctacatgcagctgagcagcctgaccagcgaagatagcgccgtgtacttctgtgcccggtccatcacaacagtcgtgggctgcgctatggactattggggccagggaacaagcgtgaccgtgtctagtacgcgtaaaattgaagttatgtatcctcctccttacctagacaatgagaagagcaatggaaccattatccatgtgaaaggggcgcgtagcagctccccaatgggcattattgtggccgtcgtgaccggaattgctgtggccgcaatcgtggcagctgtcgtcgctctgatctattgcagaaagaagcggatcagcgccctgccagggtatcctgagtgccgcgaaatgggcgaaactctgcctgagaaacctgctaaccccacaaatcccgatgaagctgacaaagtcggcgctgaaaacacgatcacatactccctgctcatgcatcctgacgctcttgaggaacctgacgatcagaaccggatc

SEQ ID NO: 8900 - DNA, 1128 bp, Artificial Sequence
  Synthetic Polynucleotide
atggccttaccagtgaccgccttgctcctgccgctggccttgctgctccacgccgccaggccggacatccagatgacacagagccctagcagcctgtctgccagcgtgggagacagagtgaccatcacatgcaaggccagcgaccacatcaacaactggctggcctggtatcagcagaagcctggacaggcccctaagctgctgatctacggcgctaccacactggaaacaggcgtgcccagcagattttctggcagcggctctggcaccgactacaccctgacaatatccagcctccagcctgaggacttcgccacctactactgtcagcagagctggaacaccccttggacattcggccagggcaccaagctggaaatcaagagaggcggaggcggaagtggaggcggaggatctggcggcggaggctctcaagttcagcttcaacagcctggcgctgagctggtcaaacctggcgcttctgtgaagatgagctgcaaagccagcggctacgccttcagcagctactggatcaactggatgaagcagaaacccggccagggactcgaatggatcggccaaatctatcccggcgacggcgacaccaactacaacggcaagttcaagggcagagccacactgaccgccgatacctctagcagcacagcctacatgcagctgagcagcctgaccagcgaagatagcgccgtgtacttctgtgcccggtccatcacaacagtcgtgggctgcgctatggactattggggccagggaacaagcgtgaccgtgtctagtacgcgtaaaattgaagttatgtatcctcctccttacctagacaatgagaagagcaatggaaccattatccatgtgaaaggggcgcgtgtcctgttctatctggctgtggggattatgttccttgtgaataccgtgctctgggttaccattcggaaagaactcaagcgcaagaaaaaatgggatcttgagataagcctggacagcgggcatgagaagaaagtcatcagttcccttcaagaggacagacatctcgaagaggaactcaaatgtcaagaacaaaaagaagaacaactccaagagggtgtccatcggaaagagccacagggcgctaca

SEQ ID NO: 8901 - DNA, 1230 bp, Artificial Sequence
  Synthetic Polynucleotide
atggccttaccagtgaccgccttgctcctgccgctggccttgctgctccacgccgccaggccggacatccagatgacacagagccctagcagcctgtctgccagcgtgggagacagagtgaccatcacatgcaaggccagcgaccacatcaacaactggctggcctggtatcagcagaagcctggacaggcccctaagctgctgatctacggcgctaccacactggaaacaggcgtgcccagcagattttctggcagcggctctggcaccgactacaccctgacaatatccagcctccagcctgaggacttcgccacctactactgtcagcagagctggaacaccccttggacattcggccagggcaccaagctggaaatcaagagaggcggaggcggaagtggaggcggaggatctggcggcggaggctctcaagttcagcttcaacagcctggcgctgagctggtcaaacctggcgcttctgtgaagatgagctgcaaagccagcggctacgccttcagcagctactggatcaactggatgaagcagaaacccggccagggactcgaatggatcggccaaatctatcccggcgacggcgacaccaactacaacggcaagttcaagggcagagccacactgaccgccgatacctctagcagcacagcctacatgcagctgagcagcctgaccagcgaagatagcgccgtgtacttctgtgcccggtccatcacaacagtcgtgggctgcgctatggactattggggccagggaacaagcgtgaccgtgtctagtacgcgtcagagcttcggcctgctggaccccaagctgtgctacctgctggatggcatcctgttcatctacggcgtgatcctgaccgccctgttcctgagagtgaagttcagcagaagcgccgacgcccctgcctaccagcagggacagaaccaactgtacaacgagctgaacctgggcagacgggaagagtacgacgtgctggacaagcggagaggcagggaccctgagatgggcggaaagccccagcggagaaagaacccccaggaaggactgtataacgaactccagaaagacaagatggccgaagcctacagcgagatcggcatgaagggcgagcggagaagaggcaagggccacgatggcctgtaccagggcctgagcaccgccaccaaggacacctatgacgccctgcacatgcaggccctgcctccaaga

SEQ ID NO: 8902 - DNA, 1356 bp, Artificial Sequence
  Synthetic Polynucleotide
atggccttaccagtgaccgccttgctcctgccgctggccttgctgctccacgccgccaggccggacatccagatgacacagagccctagcagcctgtctgccagcgtgggagacagagtgaccatcacatgcaaggccagcgaccacatcaacaactggctggcctggtatcagcagaagcctggacaggcccctaagctgctgatctacggcgctaccacactggaaacaggcgtgcccagcagattttctggcagcggctctggcaccgactacaccctgacaatatccagcctccagcctgaggacttcgccacctactactgtcagcagagctggaacaccccttggacattcggccagggcaccaagctggaaatcaagagaggcggaggcggaagtggaggcggaggatctggcggcggaggctctcaagttcagcttcaacagcctggcgctgagctggtcaaacctggcgcttctgtgaagatgagctgcaaagccagcggctacgccttcagcagctactggatcaactggatgaagcagaaacccggccagggactcgaatggatcggccaaatctatcccggcgacggcgacaccaactacaacggcaagttcaagggcagagccacactgaccgccgatacctctagcagcacagcctacatgcagctgagcagcctgaccagcgaagatagcgccgtgtacttctgtgcccggtccatcacaacagtcgtgggctgcgctatggactattggggccagggaacaagcgtgaccgtgtctagtacgcgtcagagcttcggcctgctggaccccaagctgtgctacctgctggatggcatcctgttcatctacggcgtgatcctgaccgccctgttcctgaaacggggcagaaagaaactcctgtatatattcaaacaaccatttatgagaccagtacaaactactcaagaggaagatggctgtagctgccgatttccagaagaagaagaaggaggatgtgaactgagagtgaagttcagcagaagcgccgacgcccctgcctaccagcagggacagaaccaactgtacaacgagctgaacctgggcagacgggaagagtacgacgtgctggacaagcggagaggcagggaccctgagatgggcggaaagccccagcggagaaagaacccccaggaaggactgtataacgaactccagaaagacaagatggccgaagcctacagcgagatcggcatgaagggcgagcggagaagaggcaagggccacgatggcctgtaccagggcctgagcaccgccaccaaggacacctatgacgccctgcacatgcaggccctgcctccaaga

SEQ ID NO: 8903 - DNA, 1353 bp, Artificial Sequence
  Synthetic Polynucleotide
atggccttaccagtgaccgccttgctcctgccgctggccttgctgctccacgccgccaggccggacatccagatgacacagagccctagcagcctgtctgccagcgtgggagacagagtgaccatcacatgcaaggccagcgaccacatcaacaactggctggcctggtatcagcagaagcctggacaggcccctaagctgctgatctacggcgctaccacactggaaacaggcgtgcccagcagattttctggcagcggctctggcaccgactacaccctgacaatatccagcctccagcctgaggacttcgccacctactactgtcagcagagctggaacaccccttggacattcggccagggcaccaagctggaaatcaagagaggcggaggcggaagtggaggcggaggatctggcggcggaggctctcaagttcagcttcaacagcctggcgctgagctggtcaaacctggcgcttctgtgaagatgagctgcaaagccagcggctacgccttcagcagctactggatcaactggatgaagcagaaacccggccagggactcgaatggatcggccaaatctatcccggcgacggcgacaccaactacaacggcaagttcaagggcagagccacactgaccgccgatacctctagcagcacagcctacatgcagctgagcagcctgaccagcgaagatagcgccgtgtacttctgtgcccggtccatcacaacagtcgtgggctgcgctatggactattggggccagggaacaagcgtgaccgtgtctagtacgcgtcagagcttcggcctgctggaccccaagctgtgctacctgctggatggcatcctgttcatctacggcgtgatcctgaccgccctgttcctgaggagtaagaggagcaggctcctgcacagtgactacatgaacatgactccacgccgccccggacccacccgcaagcattaccagccctatgccccaccacgcgacttcgcagcctatcgctccagagtgaagttcagcagaagcgccgacgcccctgcctaccagcagggacagaaccaactgtacaacgagctgaacctgggcagacgggaagagtacgacgtgctggacaagcggagaggcagggaccctgagatgggcggaaagccccagcggagaaagaacccccaggaaggactgtataacgaactccagaaagacaagatggccgaagcctacagcgagatcggcatgaagggcgagcggagaagaggcaagggccacgatggcctgtaccagggcctgagcaccgccaccaaggacacctatgacgccctgcacatgcaggccctgcctccaaga

SEQ ID NO: 8904 - DNA, 1338 bp, Artificial Sequence
  Synthetic Polynucleotide
atggccttaccagtgaccgccttgctcctgccgctggccttgctgctccacgccgccaggccggacatccagatgacacagagccctagcagcctgtctgccagcgtgggagacagagtgaccatcacatgcaaggccagcgaccacatcaacaactggctggcctggtatcagcagaagcctggacaggcccctaagctgctgatctacggcgctaccacactggaaacaggcgtgcccagcagattttctggcagcggctctggcaccgactacaccctgacaatatccagcctccagcctgaggacttcgccacctactactgtcagcagagctggaacaccccttggacattcggccagggcaccaagctggaaatcaagagaggcggaggcggaagtggaggcggaggatctggcggcggaggctctcaagttcagcttcaacagcctggcgctgagctggtcaaacctggcgcttctgtgaagatgagctgcaaagccagcggctacgccttcagcagctactggatcaactggatgaagcagaaacccggccagggactcgaatggatcggccaaatctatcccggcgacggcgacaccaactacaacggcaagttcaagggcagagccacactgaccgccgatacctctagcagcacagcctacatgcagctgagcagcctgaccagcgaagatagcgccgtgtacttctgtgcccggtccatcacaacagtcgtgggctgcgctatggactattggggccagggaacaagcgtgaccgtgtctagtacgcgtcagagcttcggcctgctggaccccaagctgtgctacctgctggatggcatcctgttcatctacggcgtgatcctgaccgccctgttcctgagggaccaaagactgcctcctgacgctcacaaacctccaggcggaggcagcttcagaacccctatccaagaggaacaggctgacgcccacagcaccctggcaaaaattagagtgaagttcagcagaagcgccgacgcccctgcctaccagcagggacagaaccaactgtacaacgagctgaacctgggcagacgggaagagtacgacgtgctggacaagcggagaggcagggaccctgagatgggcggaaagccccagcggagaaagaacccccaggaaggactgtataacgaactccagaaagacaagatggccgaagcctacagcgagatcggcatgaagggcgagcggagaagaggcaagggccacgatggcctgtaccagggcctgagcaccgccaccaaggacacctatgacgccctgcacatgcaggccctgcctccaaga

SEQ ID NO: 8905 - DNA, 1590 bp, Artificial Sequence
  Synthetic Polynucleotide
atggccttaccagtgaccgccttgctcctgccgctggccttgctgctccacgccgccaggccggacatccagatgacacagagccctagcagcctgtctgccagcgtgggagacagagtgaccatcacatgcaaggccagcgaccacatcaacaactggctggcctggtatcagcagaagcctggacaggcccctaagctgctgatctacggcgctaccacactggaaacaggcgtgcccagcagattttctggcagcggctctggcaccgactacaccctgacaatatccagcctccagcctgaggacttcgccacctactactgtcagcagagctggaacaccccttggacattcggccagggcaccaagctggaaatcaagagaggcggaggcggaagtggaggcggaggatctggcggcggaggctctcaagttcagcttcaacagcctggcgctgagctggtcaaacctggcgcttctgtgaagatgagctgcaaagccagcggctacgccttcagcagctactggatcaactggatgaagcagaaacccggccagggactcgaatggatcggccaaatctatcccggcgacggcgacaccaactacaacggcaagttcaagggcagagccacactgaccgccgatacctctagcagcacagcctacatgcagctgagcagcctgaccagcgaagatagcgccgtgtacttctgtgcccggtccatcacaacagtcgtgggctgcgctatggactattggggccagggaacaagcgtgaccgtgtctagtacgcgtcagagcttcggcctgctggaccccaagctgtgctacctgctggatggcatcctgttcatctacggcgtgatcctgaccgccctgttcctgtggcggcggaagcggaaagagaagcagtctgagacaagccccaaagagttcctgaccatctacgaggacgtgaaggacctgaaaacccggcggaaccacgaacaagagcagacctttcctggcggaggcagcaccatctacagcatgatccagagccagagcagcgcccctacaagccaagagcctgcctacacactgtactccctgatccagcctagcagaaagagcggcagccggaagagaaatcacagccccagcttcaacagcacgatctacgaagtgatcggcaagagccagccaaaggctcagaaccctgccagactgagccggaaagagctggaaaacttcgacgtgtacagcagagtgaagttcagcagaagcgccgacgcccctgcctaccagcagggacagaaccaactgtacaacgagctgaacctgggcagacgggaagagtacgacgtgctggacaagcggagaggcagggaccctgagatgggcggaaagccccagcggagaaagaacccccaggaaggactgtataacgaactccagaaagacaagatggccgaagcctacagcgagatcggcatgaagggcgagcggagaagaggcaagggccacgatggcctgtaccagggcctgagcaccgccaccaaggacacctatgacgccctgcacatgcaggccctgcctccaaga

SEQ ID NO: 8906 - DNA, 1230 bp, Artificial Sequence
  Synthetic Polynucleotide
atggccttaccagtgaccgccttgctcctgccgctggccttgctgctccacgccgccaggccggacatccagatgacacagagccctagcagcctgtctgccagcgtgggagacagagtgaccatcacatgcaaggccagcgaccacatcaacaactggctggcctggtatcagcagaagcctggacaggcccctaagctgctgatctacggcgctaccacactggaaacaggcgtgcccagcagattttctggcagcggctctggcaccgactacaccctgacaatatccagcctccagcctgaggacttcgccacctactactgtcagcagagctggaacaccccttggacattcggccagggcaccaagctggaaatcaagagaggcggaggcggaagtggaggcggaggatctggcggcggaggctctcaagttcagcttcaacagcctggcgctgagctggtcaaacctggcgcttctgtgaagatgagctgcaaagccagcggctacgccttcagcagctactggatcaactggatgaagcagaaacccggccagggactcgaatggatcggccaaatctatcccggcgacggcgacaccaactacaacggcaagttcaagggcagagccacactgaccgccgatacctctagcagcacagcctacatgcagctgagcagcctgaccagcgaagatagcgccgtgtacttctgtgcccggtccatcacaacagtcgtgggctgcgctatggactattggggccagggaacaagcgtgaccgtgtctagtacgcgtcagagcttcggcctgctggaccccaagctgagctacctgctggatggcatcctgttcatctacggcgtgatcctgaccgccctgttcctgagagtgaagttcagcagaagcgccgacgcccctgcctaccagcagggacagaaccaactgtacaacgagctgaacctgggcagacgggaagagtacgacgtgctggacaagcggagaggcagggaccctgagatgggcggaaagccccagcggagaaagaacccccaggaaggactgtataacgaactccagaaagacaagatggccgaagcctacagcgagatcggcatgaagggcgagcggagaagaggcaagggccacgatggcctgtaccagggcctgagcaccgccaccaaggacacctatgacgccctgcacatgcaggccctgcctccaaga

SEQ ID NO: 8907 - DNA, 1230 bp, Artificial Sequence
  Synthetic Polynucleotide
atggccttaccagtgaccgccttgctcctgccgctggccttgctgctccacgccgccaggccggacatccagatgacacagagccctagcagcctgtctgccagcgtgggagacagagtgaccatcacatgcaaggccagcgaccacatcaacaactggctggcctggtatcagcagaagcctggacaggcccctaagctgctgatctacggcgctaccacactggaaacaggcgtgcccagcagattttctggcagcggctctggcaccgactacaccctgacaatatccagcctccagcctgaggacttcgccacctactactgtcagcagagctggaacaccccttggacattcggccagggcaccaagctggaaatcaagagaggcggaggcggaagtggaggcggaggatctggcggcggaggctctcaagttcagcttcaacagcctggcgctgagctggtcaaacctggcgcttctgtgaagatgagctgcaaagccagcggctacgccttcagcagctactggatcaactggatgaagcagaaacccggccagggactcgaatggatcggccaaatctatcccggcgacggcgacaccaactacaacggcaagttcaagggcagagccacactgaccgccgatacctctagcagcacagcctacatgcagctgagcagcctgaccagcgaagatagcgccgtgtacttctgtgcccggtccatcacaacagtcgtgggctgcgctatggactattggggccagggaacaagcgtgaccgtgtctagtacgcgtcagagcttcggcctgctggaccccaagctgtgctacctgctggatggcatcctgttcatctacggcgtgatcctgaccgccctgttcctgagagtgaagttcagcagaagcgccgacgcccctgcctaccagcagggacagaaccaactgtacaacgagctgaacctgggcagacgggaagagtacgacgtgctggacaagcggagaggcagggaccctgagatgggcggaaagccccagcggagaaagaacccccaggaaggactgttcaacgaactccagaaagacaagatggccgaagccttcagcgagatcggcatgaagggcgagcggagaagaggcaagggccacgatggcctgttccagggcctgagcaccgccaccaaggacaccttcgacgccctgcacatgcaggccctgcctccaaga

SEQ ID NO: 8908 - DNA, 1023 bp, Artificial Sequence
  Synthetic Polynucleotide
atggccttaccagtgaccgccttgctcctgccgctggccttgctgctccacgccgccaggccggacatccagatgacacagagccctagcagcctgtctgccagcgtgggagacagagtgaccatcacatgcaaggccagcgaccacatcaacaactggctggcctggtatcagcagaagcctggacaggcccctaagctgctgatctacggcgctaccacactggaaacaggcgtgcccagcagattttctggcagcggctctggcaccgactacaccctgacaatatccagcctccagcctgaggacttcgccacctactactgtcagcagagctggaacaccccttggacattcggccagggcaccaagctggaaatcaagagaggcggaggcggaagtggaggcggaggatctggcggcggaggctctcaagttcagcttcaacagcctggcgctgagctggtcaaacctggcgcttctgtgaagatgagctgcaaagccagcggctacgccttcagcagctactggatcaactggatgaagcagaaacccggccagggactcgaatggatcggccaaatctatcccggcgacggcgacaccaactacaacggcaagttcaagggcagagccacactgaccgccgatacctctagcagcacagcctacatgcagctgagcagcctgaccagcgaagatagcgccgtgtacttctgtgcccggtccatcacaacagtcgtgggctgcgctatggactattggggccagggaacaagcgtgaccgtgtctagtacgcgtacaacacctggcgagagaagtagcctgcctgccttctatcctggcaccagcggctcttgttctggctgtggatctctgagcctgcctctgctggctggactggttgctgctgatgctgtggcctctctgctgattgtgggagccgtgttcctgtgcgccagacctagaagaagccccgctcaagaggacggcaaggtgtacatcaacatgcccggcagagga

SEQ ID NO: 8909 - DNA, 1149 bp, Artificial Sequence
  Synthetic Polynucleotide
atggccttaccagtgaccgccttgctcctgccgctggccttgctgctccacgccgccaggccggacatccagatgacacagagccctagcagcctgtctgccagcgtgggagacagagtgaccatcacatgcaaggccagcgaccacatcaacaactggctggcctggtatcagcagaagcctggacaggcccctaagctgctgatctacggcgctaccacactggaaacaggcgtgcccagcagattttctggcagcggctctggcaccgactacaccctgacaatatccagcctccagcctgaggacttcgccacctactactgtcagcagagctggaacaccccttggacattcggccagggcaccaagctggaaatcaagagaggcggaggcggaagtggaggcggaggatctggcggcggaggctctcaagttcagcttcaacagcctggcgctgagctggtcaaacctggcgcttctgtgaagatgagctgcaaagccagcggctacgccttcagcagctactggatcaactggatgaagcagaaacccggccagggactcgaatggatcggccaaatctatcccggcgacggcgacaccaactacaacggcaagttcaagggcagagccacactgaccgccgatacctctagcagcacagcctacatgcagctgagcagcctgaccagcgaagatagcgccgtgtacttctgtgcccggtccatcacaacagtcgtgggctgcgctatggactattggggccagggaacaagcgtgaccgtgtctagtacgcgtacaacacctggcgagagaagtagcctgcctgccttctatcctggcaccagcggctcttgttctggctgtggatctctgagcctgcctctgctggctggactggttgctgctgatgctgtggcctctctgctgattgtgggagccgtgttcaaacggggcagaaagaaactcctgtatatattcaaacaaccatttatgagaccagtacaaactactcaagaggaagatggctgtagctgccgatttccagaagaagaagaaggaggatgtgaactgctgtgcgccagacctagaagaagccccgctcaagaggacggcaaggtgtacatcaacatgcccggcagagga

SEQ ID NO: 8910 - DNA, 1146 bp, Artificial Sequence
  Synthetic Polynucleotide
atggccttaccagtgaccgccttgctcctgccgctggccttgctgctccacgccgccaggccggacatccagatgacacagagccctagcagcctgtctgccagcgtgggagacagagtgaccatcacatgcaaggccagcgaccacatcaacaactggctggcctggtatcagcagaagcctggacaggcccctaagctgctgatctacggcgctaccacactggaaacaggcgtgcccagcagattttctggcagcggctctggcaccgactacaccctgacaatatccagcctccagcctgaggacttcgccacctactactgtcagcagagctggaacaccccttggacattcggccagggcaccaagctggaaatcaagagaggcggaggcggaagtggaggcggaggatctggcggcggaggctctcaagttcagcttcaacagcctggcgctgagctggtcaaacctggcgcttctgtgaagatgagctgcaaagccagcggctacgccttcagcagctactggatcaactggatgaagcagaaacccggccagggactcgaatggatcggccaaatctatcccggcgacggcgacaccaactacaacggcaagttcaagggcagagccacactgaccgccgatacctctagcagcacagcctacatgcagctgagcagcctgaccagcgaagatagcgccgtgtacttctgtgcccggtccatcacaacagtcgtgggctgcgctatggactattggggccagggaacaagcgtgaccgtgtctagtacgcgtacaacacctggcgagagaagtagcctgcctgccttctatcctggcaccagcggctcttgttctggctgtggatctctgagcctgcctctgctggctggactggttgctgctgatgctgtggcctctctgctgattgtgggagccgtgttcaggagtaagaggagcaggctcctgcacagtgactacatgaacatgactccacgccgccccggacccacccgcaagcattaccagccctatgccccaccacgcgacttcgcagcctatcgctccctgtgcgccagacctagaagaagccccgctcaagaggacggcaaggtgtacatcaacatgcccggcagagga

SEQ ID NO: 8911 - DNA, 1131 bp, Artificial Sequence
  Synthetic Polynucleotide
atggccttaccagtgaccgccttgctcctgccgctggccttgctgctccacgccgccaggccggacatccagatgacacagagccctagcagcctgtctgccagcgtgggagacagagtgaccatcacatgcaaggccagcgaccacatcaacaactggctggcctggtatcagcagaagcctggacaggcccctaagctgctgatctacggcgctaccacactggaaacaggcgtgcccagcagattttctggcagcggctctggcaccgactacaccctgacaatatccagcctccagcctgaggacttcgccacctactactgtcagcagagctggaacaccccttggacattcggccagggcaccaagctggaaatcaagagaggcggaggcggaagtggaggcggaggatctggcggcggaggctctcaagttcagcttcaacagcctggcgctgagctggtcaaacctggcgcttctgtgaagatgagctgcaaagccagcggctacgccttcagcagctactggatcaactggatgaagcagaaacccggccagggactcgaatggatcggccaaatctatcccggcgacggcgacaccaactacaacggcaagttcaagggcagagccacactgaccgccgatacctctagcagcacagcctacatgcagctgagcagcctgaccagcgaagatagcgccgtgtacttctgtgcccggtccatcacaacagtcgtgggctgcgctatggactattggggccagggaacaagcgtgaccgtgtctagtacgcgtacaacacctggcgagagaagtagcctgcctgccttctatcctggcaccagcggctcttgttctggctgtggatctctgagcctgcctctgctggctggactggttgctgctgatgctgtggcctctctgctgattgtgggagccgtgttcagggaccaaagactgcctcctgacgctcacaaacctccaggcggaggcagcttcagaacccctatccaagaggaacaggctgacgcccacagcaccctggcaaaaattctgtgcgccagacctagaagaagccccgctcaagaggacggcaaggtgtacatcaacatgcccggcagagga

SEQ ID NO: 8912 - DNA, 1383 bp, Artificial Sequence
  Synthetic Polynucleotide
atggccttaccagtgaccgccttgctcctgccgctggccttgctgctccacgccgccaggccggacatccagatgacacagagccctagcagcctgtctgccagcgtgggagacagagtgaccatcacatgcaaggccagcgaccacatcaacaactggctggcctggtatcagcagaagcctggacaggcccctaagctgctgatctacggcgctaccacactggaaacaggcgtgcccagcagattttctggcagcggctctggcaccgactacaccctgacaatatccagcctccagcctgaggacttcgccacctactactgtcagcagagctggaacaccccttggacattcggccagggcaccaagctggaaatcaagagaggcggaggcggaagtggaggcggaggatctggcggcggaggctctcaagttcagcttcaacagcctggcgctgagctggtcaaacctggcgcttctgtgaagatgagctgcaaagccagcggctacgccttcagcagctactggatcaactggatgaagcagaaacccggccagggactcgaatggatcggccaaatctatcccggcgacggcgacaccaactacaacggcaagttcaagggcagagccacactgaccgccgatacctctagcagcacagcctacatgcagctgagcagcctgaccagcgaagatagcgccgtgtacttctgtgcccggtccatcacaacagtcgtgggctgcgctatggactattggggccagggaacaagcgtgaccgtgtctagtacgcgtacaacacctggcgagagaagtagcctgcctgccttctatcctggcaccagcggctcttgttctggctgtggatctctgagcctgcctctgctggctggactggttgctgctgatgctgtggcctctctgctgattgtgggagccgtgttctggcggcggaagcggaaagagaagcagtctgagacaagccccaaagagttcctgaccatctacgaggacgtgaaggacctgaaaacccggcggaaccacgaacaagagcagacctttcctggcggaggcagcaccatctacagcatgatccagagccagagcagcgcccctacaagccaagagcctgcctacacactgtactccctgatccagcctagcagaaagagcggcagccggaagagaaatcacagccccagcttcaacagcacgatctacgaagtgatcggcaagagccagccaaaggctcagaaccctgccagactgagccggaaagagctggaaaacttcgacgtgtacagcctgtgcgccagacctagaagaagccccgctcaagaggacggcaaggtgtacatcaacatgcccggcagagga

SEQ ID NO: 8913 - DNA, 1131 bp, Artificial Sequence
  Synthetic Polynucleotide
atggccttaccagtgaccgccttgctcctgccgctggccttgctgctccacgccgccaggccggacatccagatgacacagagccctagcagcctgtctgccagcgtgggagacagagtgaccatcacatgcaaggccagcgaccacatcaacaactggctggcctggtatcagcagaagcctggacaggcccctaagctgctgatctacggcgctaccacactggaaacaggcgtgcccagcagattttctggcagcggctctggcaccgactacaccctgacaatatccagcctccagcctgaggacttcgccacctactactgtcagcagagctggaacaccccttggacattcggccagggcaccaagctggaaatcaagagaggcggaggcggaagtggaggcggaggatctggcggcggaggctctcaagttcagcttcaacagcctggcgctgagctggtcaaacctggcgcttctgtgaagatgagctgcaaagccagcggctacgccttcagcagctactggatcaactggatgaagcagaaacccggccagggactcgaatggatcggccaaatctatcccggcgacggcgacaccaactacaacggcaagttcaagggcagagccacactgaccgccgatacctctagcagcacagcctacatgcagctgagcagcctgaccagcgaagatagcgccgtgtacttctgtgcccggtccatcacaacagtcgtgggctgcgctatggactattggggccagggaacaagcgtgaccgtgtctagtacgcgtctgggagagcctcagctgtgctatatcctggacgccatcctgtttctgtacggcatcgtgctgaccctgctgtactgcaaacggggcagaaagaaactcctgtatatattcaaacaaccatttatgagaccagtacaaactactcaagaggaagatggctgtagctgccgatttccagaagaagaagaaggaggatgtgaactgcggctgaagatccaagtgcggaaggccgccatcaccagctacgagaaatccgacggcgtgtacaccggcctgagcaccagaaatcaagagacatacgagacactgaagcacgaaaagcctccacaa

SEQ ID NO: 8914 - DNA, 1128 bp, Artificial Sequence
  Synthetic Polynucleotide
atggccttaccagtgaccgccttgctcctgccgctggccttgctgctccacgccgccaggccggacatccagatgacacagagccctagcagcctgtctgccagcgtgggagacagagtgaccatcacatgcaaggccagcgaccacatcaacaactggctggcctggtatcagcagaagcctggacaggcccctaagctgctgatctacggcgctaccacactggaaacaggcgtgcccagcagattttctggcagcggctctggcaccgactacaccctgacaatatccagcctccagcctgaggacttcgccacctactactgtcagcagagctggaacaccccttggacattcggccagggcaccaagctggaaatcaagagaggcggaggcggaagtggaggcggaggatctggcggcggaggctctcaagttcagcttcaacagcctggcgctgagctggtcaaacctggcgcttctgtgaagatgagctgcaaagccagcggctacgccttcagcagctactggatcaactggatgaagcagaaacccggccagggactcgaatggatcggccaaatctatcccggcgacggcgacaccaactacaacggcaagttcaagggcagagccacactgaccgccgatacctctagcagcacagcctacatgcagctgagcagcctgaccagcgaagatagcgccgtgtacttctgtgcccggtccatcacaacagtcgtgggctgcgctatggactattggggccagggaacaagcgtgaccgtgtctagtacgcgtctgggagagcctcagctgtgctatatcctggacgccatcctgtttctgtacggcatcgtgctgaccctgctgtactgcaggagtaagaggagcaggctcctgcacagtgactacatgaacatgactccacgccgccccggacccacccgcaagcattaccagccctatgccccaccacgcgacttcgcagcctatcgctcccggctgaagatccaagtgcggaaggccgccatcaccagctacgagaaatccgacggcgtgtacaccggcctgagcaccagaaatcaagagacatacgagacactgaagcacgaaaagcctccacaa

SEQ ID NO: 8915 - DNA, 1113 bp, Artificial Sequence
  Synthetic Polynucleotide
atggccttaccagtgaccgccttgctcctgccgctggccttgctgctccacgccgccaggccggacatccagatgacacagagccctagcagcctgtctgccagcgtgggagacagagtgaccatcacatgcaaggccagcgaccacatcaacaactggctggcctggtatcagcagaagcctggacaggcccctaagctgctgatctacggcgctaccacactggaaacaggcgtgcccagcagattttctggcagcggctctggcaccgactacaccctgacaatatccagcctccagcctgaggacttcgccacctactactgtcagcagagctggaacaccccttggacattcggccagggcaccaagctggaaatcaagagaggcggaggcggaagtggaggcggaggatctggcggcggaggctctcaagttcagcttcaacagcctggcgctgagctggtcaaacctggcgcttctgtgaagatgagctgcaaagccagcggctacgccttcagcagctactggatcaactggatgaagcagaaacccggccagggactcgaatggatcggccaaatctatcccggcgacggcgacaccaactacaacggcaagttcaagggcagagccacactgaccgccgatacctctagcagcacagcctacatgcagctgagcagcctgaccagcgaagatagcgccgtgtacttctgtgcccggtccatcacaacagtcgtgggctgcgctatggactattggggccagggaacaagcgtgaccgtgtctagtacgcgtctgggagagcctcagctgtgctatatcctggacgccatcctgtttctgtacggcatcgtgctgaccctgctgtactgcagggaccaaagactgcctcctgacgctcacaaacctccaggcggaggcagcttcagaacccctatccaagaggaacaggctgacgcccacagcaccctggcaaaaattcggctgaagatccaagtgcggaaggccgccatcaccagctacgagaaatccgacggcgtgtacaccggcctgagcaccagaaatcaagagacatacgagacactgaagcacgaaaagcctccacaa

SEQ ID NO: 8916 - DNA, 1365 bp, Artificial Sequence
  Synthetic Polynucleotide
atggccttaccagtgaccgccttgctcctgccgctggccttgctgctccacgccgccaggccggacatccagatgacacagagccctagcagcctgtctgccagcgtgggagacagagtgaccatcacatgcaaggccagcgaccacatcaacaactggctggcctggtatcagcagaagcctggacaggcccctaagctgctgatctacggcgctaccacactggaaacaggcgtgcccagcagattttctggcagcggctctggcaccgactacaccctgacaatatccagcctccagcctgaggacttcgccacctactactgtcagcagagctggaacaccccttggacattcggccagggcaccaagctggaaatcaagagaggcggaggcggaagtggaggcggaggatctggcggcggaggctctcaagttcagcttcaacagcctggcgctgagctggtcaaacctggcgcttctgtgaagatgagctgcaaagccagcggctacgccttcagcagctactggatcaactggatgaagcagaaacccggccagggactcgaatggatcggccaaatctatcccggcgacggcgacaccaactacaacggcaagttcaagggcagagccacactgaccgccgatacctctagcagcacagcctacatgcagctgagcagcctgaccagcgaagatagcgccgtgtacttctgtgcccggtccatcacaacagtcgtgggctgcgctatggactattggggccagggaacaagcgtgaccgtgtctagtacgcgtctgggagagcctcagctgtgctatatcctggacgccatcctgtttctgtacggcatcgtgctgaccctgctgtactgctggcggcggaagcggaaagagaagcagtctgagacaagccccaaagagttcctgaccatctacgaggacgtgaaggacctgaaaacccggcggaaccacgaacaagagcagacctttcctggcggaggcagcaccatctacagcatgatccagagccagagcagcgcccctacaagccaagagcctgcctacacactgtactccctgatccagcctagcagaaagagcggcagccggaagagaaatcacagccccagcttcaacagcacgatctacgaagtgatcggcaagagccagccaaaggctcagaaccctgccagactgagccggaaagagctggaaaacttcgacgtgtacagccggctgaagatccaagtgcggaaggccgccatcaccagctacgagaaatccgacggcgtgtacaccggcctgagcaccagaaatcaagagacatacgagacactgaagcacgaaaagcctccacaa

SEQ ID NO: 8917 - DNA, 1005 bp, Artificial Sequence
  Synthetic Polynucleotide
atggccttaccagtgaccgccttgctcctgccgctggccttgctgctccacgccgccaggccggacatccagatgacacagagccctagcagcctgtctgccagcgtgggagacagagtgaccatcacatgcaaggccagcgaccacatcaacaactggctggcctggtatcagcagaagcctggacaggcccctaagctgctgatctacggcgctaccacactggaaacaggcgtgcccagcagattttctggcagcggctctggcaccgactacaccctgacaatatccagcctccagcctgaggacttcgccacctactactgtcagcagagctggaacaccccttggacattcggccagggcaccaagctggaaatcaagagaggcggaggcggaagtggaggcggaggatctggcggcggaggctctcaagttcagcttcaacagcctggcgctgagctggtcaaacctggcgcttctgtgaagatgagctgcaaagccagcggctacgccttcagcagctactggatcaactggatgaagcagaaacccggccagggactcgaatggatcggccaaatctatcccggcgacggcgacaccaactacaacggcaagttcaagggcagagccacactgaccgccgatacctctagcagcacagcctacatgcagctgagcagcctgaccagcgaagatagcgccgtgtacttctgtgcccggtccatcacaacagtcgtgggctgcgctatggactattggggccagggaacaagcgtgaccgtgtctagtacgcgtctgggagagcctcagctgagctatatcctggacgccatcctgtttctgtacggcatcgtgctgaccctgctgtactgccggctgaagatccaagtgcggaaggccgccatcaccagctacgagaaatccgacggcgtgtacaccggcctgagcaccagaaatcaagagacatacgagacactgaagcacgaaaagcctccacaa

SEQ ID NO: 8918 - DNA, 1059 bp, Artificial Sequence
  Synthetic Polynucleotide
atggccttaccagtgaccgccttgctcctgccgctggccttgctgctccacgccgccaggccggacatccagatgacacagagccctagcagcctgtctgccagcgtgggagacagagtgaccatcacatgcaaggccagcgaccacatcaacaactggctggcctggtatcagcagaagcctggacaggcccctaagctgctgatctacggcgctaccacactggaaacaggcgtgcccagcagattttctggcagcggctctggcaccgactacaccctgacaatatccagcctccagcctgaggacttcgccacctactactgtcagcagagctggaacaccccttggacattcggccagggcaccaagctggaaatcaagagaggcggaggcggaagtggaggcggaggatctggcggcggaggctctcaagttcagcttcaacagcctggcgctgagctggtcaaacctggcgcttctgtgaagatgagctgcaaagccagcggctacgccttcagcagctactggatcaactggatgaagcagaaacccggccagggactcgaatggatcggccaaatctatcccggcgacggcgacaccaactacaacggcaagttcaagggcagagccacactgaccgccgatacctctagcagcacagcctacatgcagctgagcagcctgaccagcgaagatagcgccgtgtacttctgtgcccggtccatcacaacagtcgtgggctgcgctatggactattggggccagggaacaagcgtgaccgtgtctagtacgcgtcaggctcagagcgattgcagctgtagcacagtgtctccaggcgtgctggccggaattgtgatgggcgatctggtgctgacagtgctgattgccctggccgtgtacttcctgggtagactggtgcctagaggaagaggcgctgccgaagccgccacaagaaagcagagaatcaccgagacagagagcccctaccaagagctgcaaggccagagaagcgacgtgtacagcgacctgaatacccagcggccttactacaaa

SEQ ID NO: 8919 - DNA, 1059 bp, Artificial Sequence
  Synthetic Polynucleotide
atggccttaccagtgaccgccttgctcctgccgctggccttgctgctccacgccgccaggccggacatccagatgacacagagccctagcagcctgtctgccagcgtgggagacagagtgaccatcacatgcaaggccagcgaccacatcaacaactggctggcctggtatcagcagaagcctggacaggcccctaagctgctgatctacggcgctaccacactggaaacaggcgtgcccagcagattttctggcagcggctctggcaccgactacaccctgacaatatccagcctccagcctgaggacttcgccacctactactgtcagcagagctggaacaccccttggacattcggccagggcaccaagctggaaatcaagagaggcggaggcggaagtggaggcggaggatctggcggcggaggctctcaagttcagcttcaacagcctggcgctgagctggtcaaacctggcgcttctgtgaagatgagctgcaaagccagcggctacgccttcagcagctactggatcaactggatgaagcagaaacccggccagggactcgaatggatcggccaaatctatcccggcgacggcgacaccaactacaacggcaagttcaagggcagagccacactgaccgccgatacctctagcagcacagcctacatgcagctgagcagcctgaccagcgaagatagcgccgtgtacttctgtgcccggtccatcacaacagtcgtgggctgcgctatggactattggggccagggaacaagcgtgaccgtgtctagtacgcgtcaggctcagagcgattgcagctctagcacagtgtctccaggcgtgctggccggaattgtgatgggcgatctggtgctgacagtgctgattgccctggccgtgtacttcctgggtagactggtgcctagaggaagaggcgctgccgaagccgccacaagaaagcagagaatcaccgagacagagagcccctaccaagagctgcaaggccagagaagcgacgtgtacagcgacctgaatacccagcggccttactacaaa

SEQ ID NO: 8920 - DNA, 1185 bp, Artificial Sequence
  Synthetic Polynucleotide
atggccttaccagtgaccgccttgctcctgccgctggccttgctgctccacgccgccaggccggacatccagatgacacagagccctagcagcctgtctgccagcgtgggagacagagtgaccatcacatgcaaggccagcgaccacatcaacaactggctggcctggtatcagcagaagcctggacaggcccctaagctgctgatctacggcgctaccacactggaaacaggcgtgcccagcagattttctggcagcggctctggcaccgactacaccctgacaatatccagcctccagcctgaggacttcgccacctactactgtcagcagagctggaacaccccttggacattcggccagggcaccaagctggaaatcaagagaggcggaggcggaagtggaggcggaggatctggcggcggaggctctcaagttcagcttcaacagcctggcgctgagctggtcaaacctggcgcttctgtgaagatgagctgcaaagccagcggctacgccttcagcagctactggatcaactggatgaagcagaaacccggccagggactcgaatggatcggccaaatctatcccggcgacggcgacaccaactacaacggcaagttcaagggcagagccacactgaccgccgatacctctagcagcacagcctacatgcagctgagcagcctgaccagcgaagatagcgccgtgtacttctgtgcccggtccatcacaacagtcgtgggctgcgctatggactattggggccagggaacaagcgtgaccgtgtctagtacgcgtcaggctcagagcgattgcagctgtagcacagtgtctccaggcgtgctggccggaattgtgatgggcgatctggtgctgacagtgctgattgccctggccgtgtacttcctgggtagactggtgcctagaggaagaggcgctgccgaagccgccacaagaaagcagagaatcaccgagacagagagcccctaccaagagctgcaaggccagagaagcgacgtgtacagcgacctgaatacccagaaacggggcagaaagaaactcctgtatatattcaaacaaccatttatgagaccagtacaaactactcaagaggaagatggctgtagctgccgatttccagaagaagaagaaggaggatgtgaactgcggccttactacaaa

SEQ ID NO: 8921 - DNA, 1182 bp, Artificial Sequence
  Synthetic Polynucleotide
atggccttaccagtgaccgccttgctcctgccgctggccttgctgctccacgccgccaggccggacatccagatgacacagagccctagcagcctgtctgccagcgtgggagacagagtgaccatcacatgcaaggccagcgaccacatcaacaactggctggcctggtatcagcagaagcctggacaggcccctaagctgctgatctacggcgctaccacactggaaacaggcgtgcccagcagattttctggcagcggctctggcaccgactacaccctgacaatatccagcctccagcctgaggacttcgccacctactactgtcagcagagctggaacaccccttggacattcggccagggcaccaagctggaaatcaagagaggcggaggcggaagtggaggcggaggatctggcggcggaggctctcaagttcagcttcaacagcctggcgctgagctggtcaaacctggcgcttctgtgaagatgagctgcaaagccagcggctacgccttcagcagctactggatcaactggatgaagcagaaacccggccagggactcgaatggatcggccaaatctatcccggcgacggcgacaccaactacaacggcaagttcaagggcagagccacactgaccgccgatacctctagcagcacagcctacatgcagctgagcagcctgaccagcgaagatagcgccgtgtacttctgtgcccggtccatcacaacagtcgtgggctgcgctatggactattggggccagggaacaagcgtgaccgtgtctagtacgcgtcaggctcagagcgattgcagctgtagcacagtgtctccaggcgtgctggccggaattgtgatgggcgatctggtgctgacagtgctgattgccctggccgtgtacttcctgggtagactggtgcctagaggaagaggcgctgccgaagccgccacaagaaagcagagaatcaccgagacagagagcccctaccaagagctgcaaggccagagaagcgacgtgtacagcgacctgaatacccagaggagcaagcggtcacggctgctccacagcgattacatgaatatgacaccacgaagaccgggtcctactcgcaaacactaccaaccctacgcacctccccgcgactttgcagcgtaccgatctcggccttactacaaa

SEQ ID NO: 8922 - DNA, 1167 bp, Artificial Sequence
  Synthetic Polynucleotide
atggccttaccagtgaccgccttgctcctgccgctggccttgctgctccacgccgccaggccggacatccagatgacacagagccctagcagcctgtctgccagcgtgggagacagagtgaccatcacatgcaaggccagcgaccacatcaacaactggctggcctggtatcagcagaagcctggacaggcccctaagctgctgatctacggcgctaccacactggaaacaggcgtgcccagcagattttctggcagcggctctggcaccgactacaccctgacaatatccagcctccagcctgaggacttcgccacctactactgtcagcagagctggaacaccccttggacattcggccagggcaccaagctggaaatcaagagaggcggaggcggaagtggaggcggaggatctggcggcggaggctctcaagttcagcttcaacagcctggcgctgagctggtcaaacctggcgcttctgtgaagatgagctgcaaagccagcggctacgccttcagcagctactggatcaactggatgaagcagaaacccggccagggactcgaatggatcggccaaatctatcccggcgacggcgacaccaactacaacggcaagttcaagggcagagccacactgaccgccgatacctctagcagcacagcctacatgcagctgagcagcctgaccagcgaagatagcgccgtgtacttctgtgcccggtccatcacaacagtcgtgggctgcgctatggactattggggccagggaacaagcgtgaccgtgtctagtacgcgtcaggctcagagcgattgcagctgtagcacagtgtctccaggcgtgctggccggaattgtgatgggcgatctggtgctgacagtgctgattgccctggccgtgtacttcctgggtagactggtgcctagaggaagaggcgctgccgaagccgccacaagaaagcagagaatcaccgagacagagagcccctaccaagagctgcaaggccagagaagcgacgtgtacagcgacctgaatacccagagggaccaaagactgcctcctgacgctcacaaacctccaggcggaggcagcttcagaacccctatccaagaggaacaggctgacgcccacagcaccctggcaaaaattcggccttactacaaa

SEQ ID NO: 8923 - DNA, 1419 bp, Artificial Sequence
  Synthetic Polynucleotide
atggccttaccagtgaccgccttgctcctgccgctggccttgctgctccacgccgccaggccggacatccagatgacacagagccctagcagcctgtctgccagcgtgggagacagagtgaccatcacatgcaaggccagcgaccacatcaacaactggctggcctggtatcagcagaagcctggacaggcccctaagctgctgatctacggcgctaccacactggaaacaggcgtgcccagcagattttctggcagcggctctggcaccgactacaccctgacaatatccagcctccagcctgaggacttcgccacctactactgtcagcagagctggaacaccccttggacattcggccagggcaccaagctggaaatcaagagaggcggaggcggaagtggaggcggaggatctggcggcggaggctctcaagttcagcttcaacagcctggcgctgagctggtcaaacctggcgcttctgtgaagatgagctgcaaagccagcggctacgccttcagcagctactggatcaactggatgaagcagaaacccggccagggactcgaatggatcggccaaatctatcccggcgacggcgacaccaactacaacggcaagttcaagggcagagccacactgaccgccgatacctctagcagcacagcctacatgcagctgagcagcctgaccagcgaagatagcgccgtgtacttctgtgcccggtccatcacaacagtcgtgggctgcgctatggactattggggccagggaacaagcgtgaccgtgtctagtacgcgtcaggctcagagcgattgcagctgtagcacagtgtctccaggcgtgctggccggaattgtgatgggcgatctggtgctgacagtgctgattgccctggccgtgtacttcctgggtagactggtgcctagaggaagaggcgctgccgaagccgccacaagaaagcagagaatcaccgagacagagagcccctaccaagagctgcaaggccagagaagcgacgtgtacagcgacctgaatacccagtggcggcggaagcggaaagagaagcagtctgagacaagccccaaagagttcctgaccatctacgaggacgtgaaggacctgaaaacccggcggaaccacgaacaagagcagacctttcctggcggaggcagcaccatctacagcatgatccagagccagagcagcgcccctacaagccaagagcctgcctacacactgtactccctgatccagcctagcagaaagagcggcagccggaagagaaatcacagccccagcttcaacagcacgatctacgaagtgatcggcaagagccagccaaaggctcagaaccctgccagactgagccggaaagagctggaaaacttcgacgtgtacagccggccttactacaaa

SEQ ID NO: 8924 - DNA, 1371 bp, Artificial Sequence
  Synthetic Polynucleotide
atggccttaccagtgaccgccttgctcctgccgctggccttgctgctccacgccgccaggccggacatccagatgacacagagccctagcagcctgtctgccagcgtgggagacagagtgaccatcacatgcaaggccagcgaccacatcaacaactggctggcctggtatcagcagaagcctggacaggcccctaagctgctgatctacggcgctaccacactggaaacaggcgtgcccagcagattttctggcagcggctctggcaccgactacaccctgacaatatccagcctccagcctgaggacttcgccacctactactgtcagcagagctggaacaccccttggacattcggccagggcaccaagctggaaatcaagagaggcggaggcggaagtggaggcggaggatctggcggcggaggctctcaagttcagcttcaacagcctggcgctgagctggtcaaacctggcgcttctgtgaagatgagctgcaaagccagcggctacgccttcagcagctactggatcaactggatgaagcagaaacccggccagggactcgaatggatcggccaaatctatcccggcgacggcgacaccaactacaacggcaagttcaagggcagagccacactgaccgccgatacctctagcagcacagcctacatgcagctgagcagcctgaccagcgaagatagcgccgtgtacttctgtgcccggtccatcacaacagtcgtgggctgcgctatggactattggggccagggaacaagcgtgaccgtgtctagtacgcgtacaacgccgggcgaaaggagttccttgccggccttttaccccggcacaagcggaagctgtagtgggtgtggaagcctcagcctcccacttcttgcgggcctcgtcgcggcagatgcagtagcttcacttcttattgtaggcgcggtatttctctgtgctcgaccaaggaggtcacccgctcaggaggatggtaaggtgtatataaatatgccaggacgcggaagctctagacgggttaagttttccagatccgcagacgcacccgcttaccaacaagggcagaaccaactctacaatgaacttaatttggggcggagggaagagtacgacgttctggacaaaaggaggggacgagatcccgagatgggcggaaagcctcagcgaaggaagaatccgcaagaggggctttataacgaactccagaaagataaaatggcagaagcctatagtgagattgggatgaagggagaaaggaggaggggtaaaggtcacgatgggttgtaccaaggattgagcacagccactaaagatacctatgatgcgctccacatgcaggccctgccgccaaga

SEQ ID NO: 8925 - DNA, 1383 bp, Artificial Sequence
  Synthetic Polynucleotide
atggccttaccagtgaccgccttgctcctgccgctggccttgctgctccacgccgccaggccggacatccagatgacacagagccctagcagcctgtctgccagcgtgggagacagagtgaccatcacatgcaaggccagcgaccacatcaacaactggctggcctggtatcagcagaagcctggacaggcccctaagctgctgatctacggcgctaccacactggaaacaggcgtgcccagcagattttctggcagcggctctggcaccgactacaccctgacaatatccagcctccagcctgaggacttcgccacctactactgtcagcagagctggaacaccccttggacattcggccagggcaccaagctggaaatcaagagaggcggaggcggaagtggaggcggaggatctggcggcggaggctctcaagttcagcttcaacagcctggcgctgagctggtcaaacctggcgcttctgtgaagatgagctgcaaagccagcggctacgccttcagcagctactggatcaactggatgaagcagaaacccggccagggactcgaatggatcggccaaatctatcccggcgacggcgacaccaactacaacggcaagttcaagggcagagccacactgaccgccgatacctctagcagcacagcctacatgcagctgagcagcctgaccagcgaagatagcgccgtgtacttctgtgcccggtccatcacaacagtcgtgggctgcgctatggactattggggccagggaacaagcgtgaccgtgtctagtacgcgtcaggctcagagcgattgcagctgtagcacagtgtctccaggcgtgctggccggaattgtgatgggcgatctggtgctgacagtgctgattgccctggccgtgtacttcctgggtagactggtgcctagaggaagaggcgctgccgaagccgccacaagaaagcagagaatcaccgagacagagagcccctaccaagagctgcaaggccagagaagcgacgtgtacagcgacctgaatacccagagagtgaagttcagcagaagcgccgacgcccctgcctaccagcagggacagaaccaactgtacaacgagctgaacctgggcagacgggaagagtacgacgtgctggacaagcggagaggcagggaccctgagatgggcggaaagccccagcggagaaagaacccccaggaaggactgtataacgaactccagaaagacaagatggccgaagcctacagcgagatcggcatgaagggcgagcggagaagaggcaagggccacgatggcctgtaccagggcctgagcaccgccaccaaggacacctatgacgccctgcacatgcaggccctgcctccaaga

SEQ ID NO: 8926 - DNA, 1311 bp, Artificial Sequence; identical to SEQ ID NO: 8840
  Synthetic Polynucleotide

SEQ ID NO: 8927 - DNA, 1437 bp, Artificial Sequence; identical to SEQ ID NO: 8841
  Synthetic Polynucleotide

SEQ ID NO: 8928 - DNA, 1434 bp, Artificial Sequence; identical to SEQ ID NO: 8842
  Synthetic Polynucleotide

SEQ ID NO: 8929 - DNA, 1419 bp, Artificial Sequence; identical to SEQ ID NO: 8843
  Synthetic Polynucleotide

SEQ ID NO: 8930 - DNA, 1671 bp, Artificial Sequence; identical to SEQ ID NO: 8844
  Synthetic Polynucleotide

SEQ ID NO: 8931 - DNA, 1311 bp, Artificial Sequence; identical to SEQ ID NO: 8845
  Synthetic Polynucleotide

SEQ ID NO: 8932 - DNA, 1311 bp, Artificial Sequence; identical to SEQ ID NO: 8846
  Synthetic Polynucleotide

SEQ ID NO: 8933 - DNA, 1104 bp, Artificial Sequence; identical to SEQ ID NO: 8847
  Synthetic Polynucleotide

SEQ ID NO: 8934 - DNA, 1230 bp, Artificial Sequence; identical to SEQ ID NO: 8848
  Synthetic Polynucleotide

SEQ ID NO: 8935 - DNA, 1227 bp, Artificial Sequence; identical to SEQ ID NO: 8849
  Synthetic Polynucleotide

SEQ ID NO: 8936 - DNA, 1212 bp, Artificial Sequence; identical to SEQ ID NO: 8850
  Synthetic Polynucleotide

SEQ ID NO: 8937 - DNA, 1464 bp, Artificial Sequence; identical to SEQ ID NO: 8851
  Synthetic Polynucleotide

SEQ ID NO: 8938 - DNA, 1212 bp, Artificial Sequence; identical to SEQ ID NO: 8852
  Synthetic Polynucleotide

SEQ ID NO: 8939 - DNA, 1209 bp, Artificial Sequence; identical to SEQ ID NO: 8853
  Synthetic Polynucleotide

SEQ ID NO: 8940 - DNA, 1194 bp, Artificial Sequence; identical to SEQ ID NO: 8854
  Synthetic Polynucleotide

SEQ ID NO: 8941 - DNA, 1446 bp, Artificial Sequence; identical to SEQ ID NO: 8855
  Synthetic Polynucleotide

SEQ ID NO: 8942 - DNA, 1086 bp, Artificial Sequence; identical to SEQ ID NO: 8856
  Synthetic Polynucleotide

SEQ ID NO: 8943 - DNA, 1140 bp, Artificial Sequence; identical to SEQ ID NO: 8857
  Synthetic Polynucleotide

SEQ ID NO: 8944 - DNA, 1140 bp, Artificial Sequence; identical to SEQ ID NO: 8858
  Synthetic Polynucleotide

SEQ ID NO: 8945 - DNA, 1266 bp, Artificial Sequence; identical to SEQ ID NO: 8859
  Synthetic Polynucleotide

SEQ ID NO: 8946 - DNA, 1263 bp, Artificial Sequence; identical to SEQ ID NO: 8860
  Synthetic Polynucleotide

SEQ ID NO: 8947 - DNA, 1248 bp, Artificial Sequence; identical to SEQ ID NO: 8861
  Synthetic Polynucleotide

SEQ ID NO: 8948 - DNA, 1500 bp, Artificial Sequence; identical to SEQ ID NO: 8862
  Synthetic Polynucleotide

SEQ ID NO: 8949 - DNA, 1452 bp, Artificial Sequence; identical to SEQ ID NO: 8863
  Synthetic Polynucleotide

SEQ ID NO: 8950 - DNA, 1464 bp, Artificial Sequence; identical to SEQ ID NO: 8864
  Synthetic Polynucleotide

SEQ ID NO: 8951 - DNA, 1536 bp, Artificial Sequence; identical to SEQ ID NO: 4851
  Synthetic Polynucleotide

SEQ ID NO: 8952 - DNA, 1509 bp, Artificial Sequence; identical to SEQ ID NO: 4852
  Synthetic Polynucleotide

SEQ ID NO: 8953 - DNA, 1515 bp, Artificial Sequence; identical to SEQ ID NO: 4853
  Synthetic Polynucleotide

SEQ ID NO: 8954 - DNA, 1515 bp, Artificial Sequence; identical to SEQ ID NO: 4854
  Synthetic Polynucleotide

SEQ ID NO: 8955 - DNA, 1530 bp, Artificial Sequence; identical to SEQ ID NO: 4855
  Synthetic Polynucleotide

SEQ ID NO: 8956 - DNA, 1515 bp, Artificial Sequence; identical to SEQ ID NO: 4856
  Synthetic Polynucleotide

SEQ ID NO: 8957 - DNA, 1500 bp, Artificial Sequence; identical to SEQ ID NO: 4857
  Synthetic Polynucleotide

SEQ ID NO: 8958 - DNA, 1512 bp, Artificial Sequence; identical to SEQ ID NO: 4858
  Synthetic Polynucleotide

SEQ ID NO: 8959 - DNA, 1509 bp, Artificial Sequence; identical to SEQ ID NO: 4859
  Synthetic Polynucleotide

SEQ ID NO: 8960 - DNA, 1509 bp, Artificial Sequence; identical to SEQ ID NO: 4860
  Synthetic Polynucleotide

SEQ ID NO: 8961 - DNA, 1515 bp, Artificial Sequence; identical to SEQ ID NO: 4861
  Synthetic Polynucleotide

SEQ ID NO: 8962 - DNA, 1524 bp, Artificial Sequence; identical to SEQ ID NO: 4862
  Synthetic Polynucleotide

SEQ ID NO: 8963 - DNA, 1527 bp, Artificial Sequence; identical to SEQ ID NO: 4863
  Synthetic Polynucleotide

SEQ ID NO: 8964 - DNA, 1509 bp, Artificial Sequence; identical to SEQ ID NO: 4864
  Synthetic Polynucleotide

SEQ ID NO: 8965 - DNA, 1500 bp, Artificial Sequence; identical to SEQ ID NO: 4865
  Synthetic Polynucleotide

SEQ ID NO: 8966 - DNA, 1512 bp, Artificial Sequence; identical to SEQ ID NO: 4866
  Synthetic Polynucleotide

SEQ ID NO: 8967 - DNA, 1506 bp, Artificial Sequence; identical to SEQ ID NO: 4867
  Synthetic Polynucleotide

SEQ ID NO: 8968 - DNA, 1524 bp, Artificial Sequence; identical to SEQ ID NO: 4868
  Synthetic Polynucleotide

SEQ ID NO: 8969 - DNA, 1494 bp, Artificial Sequence; identical to SEQ ID NO: 4869
  Synthetic Polynucleotide

SEQ ID NO: 8970 - DNA, 1521 bp, Artificial Sequence; identical to SEQ ID NO: 4870
  Synthetic Polynucleotide

SEQ ID NO: 8971 - DNA, 1533 bp, Artificial Sequence; identical to SEQ ID NO: 4871
  Synthetic Polynucleotide

SEQ ID NO: 8972 - DNA, 1533 bp, Artificial Sequence; identical to SEQ ID NO: 4872
  Synthetic Polynucleotide

SEQ ID NO: 8973 - DNA, 1518 bp, Artificial Sequence; identical to SEQ ID NO: 4873
  Synthetic Polynucleotide

SEQ ID NO: 8974 - DNA, 1518 bp, Artificial Sequence; identical to SEQ ID NO: 4873
  Synthetic Polynucleotide

SEQ ID NO: 8975 - DNA, 1518 bp, Artificial Sequence; identical to SEQ ID NO: 4875
  Synthetic Polynucleotide

SEQ ID NO: 8976 - DNA, 1506 bp, Artificial Sequence; identical to SEQ ID NO: 4876
  Synthetic Polynucleotide

SEQ ID NO: 8977 - DNA, 1515 bp, Artificial Sequence; identical to SEQ ID NO: 4877
  Synthetic Polynucleotide

SEQ ID NO: 8978 - DNA, 1539 bp, Artificial Sequence; identical to SEQ ID NO: 4878
  Synthetic Polynucleotide

SEQ ID NO: 8979 - DNA, 1530 bp, Artificial Sequence; identical to SEQ ID NO: 4879
  Synthetic Polynucleotide

SEQ ID NO: 8980 - DNA, 1500 bp, Artificial Sequence; identical to SEQ ID NO: 4880
  Synthetic Polynucleotide

SEQ ID NO: 8981 - DNA, 1509 bp, Artificial Sequence; identical to SEQ ID NO: 4881
  Synthetic Polynucleotide

SEQ ID NO: 8982 - DNA, 1485 bp, Artificial Sequence; identical to SEQ ID NO: 4882
  Synthetic Polynucleotide

SEQ ID NO: 8983 - DNA, 1500 bp, Artificial Sequence; identical to SEQ ID NO: 4883
  Synthetic Polynucleotide

SEQ ID NO: 8984 - DNA, 1509 bp, Artificial Sequence; identical to SEQ ID NO: 4884
  Synthetic Polynucleotide

SEQ ID NO: 8985 - DNA, 1524 bp, Artificial Sequence; identical to SEQ ID NO: 4885
  Synthetic Polynucleotide

SEQ ID NO: 8986 - DNA, 1506 bp, Artificial Sequence; identical to SEQ ID NO: 4886
  Synthetic Polynucleotide

SEQ ID NO: 8987 - DNA, 1509 bp, Artificial Sequence; identical to SEQ ID NO: 4887
  Synthetic Polynucleotide

SEQ ID NO: 8988 - DNA, 1527 bp, Artificial Sequence; identical to SEQ ID NO: 4888
  Synthetic Polynucleotide

SEQ ID NO: 8989 - DNA, 1527 bp, Artificial Sequence; identical to SEQ ID NO: 4889
  Synthetic Polynucleotide

SEQ ID NO: 8990 - DNA, 1521 bp, Artificial Sequence; identical to SEQ ID NO: 4890
  Synthetic Polynucleotide

SEQ ID NO: 8991 - DNA, 1506 bp, Artificial Sequence; identical to SEQ ID NO: 4891
  Synthetic Polynucleotide

SEQ ID NO: 8992 - DNA, 1506 bp, Artificial Sequence; identical to SEQ ID NO: 4892
  Synthetic Polynucleotide

SEQ ID NO: 8993 - DNA, 1506 bp, Artificial Sequence; identical to SEQ ID NO: 4893
  Synthetic Polynucleotide

SEQ ID NO: 8994 - DNA, 1530 bp, Artificial Sequence; identical to SEQ ID NO: 4894
  Synthetic Polynucleotide

SEQ ID NO: 8995 - DNA, 1527 bp, Artificial Sequence; identical to SEQ ID NO: 4895
  Synthetic Polynucleotide

SEQ ID NO: 8996 - DNA, 1521 bp, Artificial Sequence; identical to SEQ ID NO: 4896
  Synthetic Polynucleotide

SEQ ID NO: 8997 - DNA, 1503 bp, Artificial Sequence; identical to SEQ ID NO: 4897
  Synthetic Polynucleotide

SEQ ID NO: 8998 - DNA, 1518 bp, Artificial Sequence; identical to SEQ ID NO: 4898
  Synthetic Polynucleotide

SEQ ID NO: 8999 - DNA, 1506 bp, Artificial Sequence; identical to SEQ ID NO: 4899
  Synthetic Polynucleotide

SEQ ID NO: 9000 - DNA, 1500 bp, Artificial Sequence; identical to SEQ ID NO: 4900
  Synthetic Polynucleotide

SEQ ID NO: 9001 - DNA, 1509 bp, Artificial Sequence; identical to SEQ ID NO: 4901
  Synthetic Polynucleotide

SEQ ID NO: 9002 - DNA, 1515 bp, Artificial Sequence; identical to SEQ ID NO: 4902
  Synthetic Polynucleotide

SEQ ID NO: 9003 - DNA, 1512 bp, Artificial Sequence; identical to SEQ ID NO: 4903
  Synthetic Polynucleotide

SEQ ID NO: 9004 - DNA, 1509 bp, Artificial Sequence; identical to SEQ ID NO: 4904
  Synthetic Polynucleotide

SEQ ID NO: 9005 - DNA, 1512 bp, Artificial Sequence; identical to SEQ ID NO: 4905
  Synthetic Polynucleotide

SEQ ID NO: 9006 - DNA, 1509 bp, Artificial Sequence; identical to SEQ ID NO: 4906
  Synthetic Polynucleotide

SEQ ID NO: 9007 - DNA, 1548 bp, Artificial Sequence; identical to SEQ ID NO: 4907
  Synthetic Polynucleotide

SEQ ID NO: 9008 - DNA, 1533 bp, Artificial Sequence; identical to SEQ ID NO: 4908
  Synthetic Polynucleotide

SEQ ID NO: 9009 - DNA, 1473 bp, Artificial Sequence; identical to SEQ ID NO: 4909
  Synthetic Polynucleotide

SEQ ID NO: 9010 - DNA, 1503 bp, Artificial Sequence; identical to SEQ ID NO: 4910
  Synthetic Polynucleotide

SEQ ID NO: 9011 - DNA, 1515 bp, Artificial Sequence; identical to SEQ ID NO: 4911
  Synthetic Polynucleotide

SEQ ID NO: 9012 - DNA, 1503 bp, Artificial Sequence; identical to SEQ ID NO: 4912
  Synthetic Polynucleotide

SEQ ID NO: 9013 - DNA, 1503 bp, Artificial Sequence; identical to SEQ ID NO: 4913
  Synthetic Polynucleotide

SEQ ID NO: 9014 - DNA, 1506 bp, Artificial Sequence; identical to SEQ ID NO: 4914
  Synthetic Polynucleotide

SEQ ID NO: 9015 - DNA, 1506 bp, Artificial Sequence; identical to SEQ ID NO: 4915
  Synthetic Polynucleotide

SEQ ID NO: 9016 - DNA, 1530 bp, Artificial Sequence; identical to SEQ ID NO: 4916
  Synthetic Polynucleotide

SEQ ID NO: 9017 - DNA, 1506 bp, Artificial Sequence; identical to SEQ ID NO: 4917
  Synthetic Polynucleotide

SEQ ID NO: 9018 - DNA, 1503 bp, Artificial Sequence; identical to SEQ ID NO: 4918
  Synthetic Polynucleotide

SEQ ID NO: 9019 - DNA, 1503 bp, Artificial Sequence; identical to SEQ ID NO: 4919
  Synthetic Polynucleotide

SEQ ID NO: 9020 - DNA, 1509 bp, Artificial Sequence; identical to SEQ ID NO: 4920
  Synthetic Polynucleotide

SEQ ID NO: 9021 - DNA, 1512 bp, Artificial Sequence; identical to SEQ ID NO: 4921
  Synthetic Polynucleotide

SEQ ID NO: 9022 - DNA, 1539 bp, Artificial Sequence; identical to SEQ ID NO: 4922
  Synthetic Polynucleotide

SEQ ID NO: 9023 - DNA, 1512 bp, Artificial Sequence; identical to SEQ ID NO: 4923
  Synthetic Polynucleotide

SEQ ID NO: 9024 - DNA, 1521 bp, Artificial Sequence; identical to SEQ ID NO: 4924
  Synthetic Polynucleotide

SEQ ID NO: 9025 - DNA, 1509 bp, Artificial Sequence; identical to SEQ ID NO: 4925
  Synthetic Polynucleotide

SEQ ID NO: 9026 - DNA, 1500 bp, Artificial Sequence; identical to SEQ ID NO: 4926
  Synthetic Polynucleotide

SEQ ID NO: 9027 - DNA, 1515 bp, Artificial Sequence; identical to SEQ ID NO: 4927
  Synthetic Polynucleotide

SEQ ID NO: 9028 - DNA, 1512 bp, Artificial Sequence; identical to SEQ ID NO: 4928
  Synthetic Polynucleotide

SEQ ID NO: 9029 - DNA, 1521 bp, Artificial Sequence; identical to SEQ ID NO: 4929
  Synthetic Polynucleotide

SEQ ID NO: 9030 - DNA, 1503 bp, Artificial Sequence; identical to SEQ ID NO: 4930
  Synthetic Polynucleotide

SEQ ID NO: 9031 - DNA, 1518 bp, Artificial Sequence; identical to SEQ ID NO: 4931
  Synthetic Polynucleotide

SEQ ID NO: 9032 - DNA, 1515 bp, Artificial Sequence; identical to SEQ ID NO: 4932
  Synthetic Polynucleotide

SEQ ID NO: 9033 - DNA, 1509 bp, Artificial Sequence; identical to SEQ ID NO: 4933
  Synthetic Polynucleotide

SEQ ID NO: 9034 - DNA, 1506 bp, Artificial Sequence; identical to SEQ ID NO: 4934
  Synthetic Polynucleotide

SEQ ID NO: 9035 - DNA, 1494 bp, Artificial Sequence; identical to SEQ ID NO: 4935
  Synthetic Polynucleotide

SEQ ID NO: 9036 - DNA, 1515 bp, Artificial Sequence; identical to SEQ ID NO: 4936
  Synthetic Polynucleotide

SEQ ID NO: 9037 - DNA, 1503 bp, Artificial Sequence; identical to SEQ ID NO: 4937
  Synthetic Polynucleotide

SEQ ID NO: 9038 - DNA, 1506 bp, Artificial Sequence; identical to SEQ ID NO: 4938
  Synthetic Polynucleotide

SEQ ID NO: 9039 - DNA, 1524 bp, Artificial Sequence; identical to SEQ ID NO: 4939
  Synthetic Polynucleotide

SEQ ID NO: 9040 - DNA, 1530 bp, Artificial Sequence; identical to SEQ ID NO: 4940
  Synthetic Polynucleotide

SEQ ID NO: 9041 - DNA, 1545 bp, Artificial Sequence; identical to SEQ ID NO: 4941
  Synthetic Polynucleotide

SEQ ID NO: 9042 - DNA, 1545 bp, Artificial Sequence; identical to SEQ ID NO: 4942
  Synthetic Polynucleotide

SEQ ID NO: 9043 - DNA, 1512 bp, Artificial Sequence; identical to SEQ ID NO: 4943
  Synthetic Polynucleotide

SEQ ID NO: 9044 - DNA, 1515 bp, Artificial Sequence; identical to SEQ ID NO: 4944
  Synthetic Polynucleotide

SEQ ID NO: 9045 - DNA, 1527 bp, Artificial Sequence; identical to SEQ ID NO: 4945
  Synthetic Polynucleotide

SEQ ID NO: 9046 - DNA, 1527 bp, Artificial Sequence; identical to SEQ ID NO: 4946
  Synthetic Polynucleotide

SEQ ID NO: 9047 - DNA, 1497 bp, Artificial Sequence; identical to SEQ ID NO: 4947
  Synthetic Polynucleotide

SEQ ID NO: 9048 - DNA, 1503 bp, Artificial Sequence; identical to SEQ ID NO: 4948
  Synthetic Polynucleotide

SEQ ID NO: 9049 - DNA, 1530 bp, Artificial Sequence; identical to SEQ ID NO: 4949
  Synthetic Polynucleotide

SEQ ID NO: 9050 - DNA, 1542 bp, Artificial Sequence; identical to SEQ ID NO: 4950
  Synthetic Polynucleotide

SEQ ID NO: 9051 - DNA, 1530 bp, Artificial Sequence; identical to SEQ ID NO: 4951
  Synthetic Polynucleotide

SEQ ID NO: 9052 - DNA, 1530 bp, Artificial Sequence; identical to SEQ ID NO: 4951
  Synthetic Polynucleotide

SEQ ID NO: 9053 - DNA, 1584 bp, Artificial Sequence; identical to SEQ ID NO: 4953
  Synthetic Polynucleotide

SEQ ID NO: 9054 - DNA, 1515 bp, Artificial Sequence; identical to SEQ ID NO: 4954
  Synthetic Polynucleotide

SEQ ID NO: 9055 - DNA, 1521 bp, Artificial Sequence; identical to SEQ ID NO: 4955
  Synthetic Polynucleotide

SEQ ID NO: 9056 - DNA, 1518 bp, Artificial Sequence; identical to SEQ ID NO: 4956
  Synthetic Polynucleotide

SEQ ID NO: 9057 - DNA, 1500 bp, Artificial Sequence; identical to SEQ ID NO: 4957
  Synthetic Polynucleotide

SEQ ID NO: 9058 - DNA, 1506 bp, Artificial Sequence; identical to SEQ ID NO: 4958
  Synthetic Polynucleotide

SEQ ID NO: 9059 - DNA, 1509 bp, Artificial Sequence; identical to SEQ ID NO: 4959
  Synthetic Polynucleotide

SEQ ID NO: 9060 - DNA, 1527 bp, Artificial Sequence; identical to SEQ ID NO: 4960
  Synthetic Polynucleotide

SEQ ID NO: 9061 - DNA, 1521 bp, Artificial Sequence; identical to SEQ ID NO: 4961
  Synthetic Polynucleotide

SEQ ID NO: 9062 - DNA, 1521 bp, Artificial Sequence; identical to SEQ ID NO: 4962
  Synthetic Polynucleotide

SEQ ID NO: 9063 - DNA, 1548 bp, Artificial Sequence; identical to SEQ ID NO: 4963
  Synthetic Polynucleotide

SEQ ID NO: 9064 - DNA, 1536 bp, Artificial Sequence; identical to SEQ ID NO: 4964
  Synthetic Polynucleotide

SEQ ID NO: 9065 - DNA, 1509 bp, Artificial Sequence; identical to SEQ ID NO: 4965
  Synthetic Polynucleotide

SEQ ID NO: 9066 - DNA, 1515 bp, Artificial Sequence; identical to SEQ ID NO: 4966
  Synthetic Polynucleotide

SEQ ID NO: 9067 - DNA, 1521 bp, Artificial Sequence; identical to SEQ ID NO: 4967
  Synthetic Polynucleotide

SEQ ID NO: 9068 - DNA, 1542 bp, Artificial Sequence; identical to SEQ ID NO: 4968
  Synthetic Polynucleotide

SEQ ID NO: 9069 - DNA, 1542 bp, Artificial Sequence; identical to SEQ ID NO: 4969
  Synthetic Polynucleotide

SEQ ID NO: 9070 - DNA, 1521 bp, Artificial Sequence; identical to SEQ ID NO: 4970
  Synthetic Polynucleotide

SEQ ID NO: 9071 - DNA, 1515 bp, Artificial Sequence; identical to SEQ ID NO: 4944
  Synthetic Polynucleotide

SEQ ID NO: 9072 - DNA, 1515 bp, Artificial Sequence; identical to SEQ ID NO: 4853
  Synthetic Polynucleotide

SEQ ID NO: 9073 - DNA, 1503 bp, Artificial Sequence; identical to SEQ ID NO: 4973
  Synthetic Polynucleotide

SEQ ID NO: 9074 - DNA, 1518 bp, Artificial Sequence; identical to SEQ ID NO: 4974
  Synthetic Polynucleotide

SEQ ID NO: 9075 - DNA, 1545 bp, Artificial Sequence; identical to SEQ ID NO: 4975
  Synthetic Polynucleotide

SEQ ID NO: 9076 - DNA, 1539 bp, Artificial Sequence; identical to SEQ ID NO: 4976
  Synthetic Polynucleotide

SEQ ID NO: 9077 - DNA, 1545 bp, Artificial Sequence; identical to SEQ ID NO: 4977
  Synthetic Polynucleotide

SEQ ID NO: 9078 - DNA, 1542 bp, Artificial Sequence; identical to SEQ ID NO: 4978
  Synthetic Polynucleotide

SEQ ID NO: 9079 - DNA, 1515 bp, Artificial Sequence; identical to SEQ ID NO: 4979
  Synthetic Polynucleotide

SEQ ID NO: 9080 - DNA, 1503 bp, Artificial Sequence; identical to SEQ ID NO: 4980
  Synthetic Polynucleotide

SEQ ID NO: 9081 - DNA, 1518 bp, Artificial Sequence; identical to SEQ ID NO: 4981
  Synthetic Polynucleotide

SEQ ID NO: 9082 - DNA, 1512 bp, Artificial Sequence; identical to SEQ ID NO: 4982
  Synthetic Polynucleotide

SEQ ID NO: 9083 - DNA, 1518 bp, Artificial Sequence; identical to SEQ ID NO: 4983
  Synthetic Polynucleotide

SEQ ID NO: 9084 - DNA, 1548 bp, Artificial Sequence; identical to SEQ ID NO: 4984
  Synthetic Polynucleotide

SEQ ID NO: 9085 - DNA, 1527 bp, Artificial Sequence; identical to SEQ ID NO: 4985
  Synthetic Polynucleotide

SEQ ID NO: 9086 - DNA, 1503 bp, Artificial Sequence; identical to SEQ ID NO: 4986
  Synthetic Polynucleotide

SEQ ID NO: 9087 - DNA, 1524 bp, Artificial Sequence; identical to SEQ ID NO: 4987
  Synthetic Polynucleotide

SEQ ID NO: 9088 - DNA, 1503 bp, Artificial Sequence; identical to SEQ ID NO: 4988
  Synthetic Polynucleotide

SEQ ID NO: 9089 - DNA, 1527 bp, Artificial Sequence; identical to SEQ ID NO: 4989
  Synthetic Polynucleotide

SEQ ID NO: 9090 - DNA, 1512 bp, Artificial Sequence; identical to SEQ ID NO: 4990
  Synthetic Polynucleotide

SEQ ID NO: 9091 - DNA, 1524 bp, Artificial Sequence; identical to SEQ ID NO: 4991
  Synthetic Polynucleotide

SEQ ID NO: 9092 - DNA, 1518 bp, Artificial Sequence; identical to SEQ ID NO: 4992
  Synthetic Polynucleotide

SEQ ID NO: 9093 - DNA, 1533 bp, Artificial Sequence; identical to SEQ ID NO: 4993
  Synthetic Polynucleotide

SEQ ID NO: 9094 - DNA, 1515 bp, Artificial Sequence; identical to SEQ ID NO: 4994
  Synthetic Polynucleotide

SEQ ID NO: 9095 - DNA, 1518 bp, Artificial Sequence; identical to SEQ ID NO: 4995
  Synthetic Polynucleotide

SEQ ID NO: 9096 - DNA, 1527 bp, Artificial Sequence; identical to SEQ ID NO: 4996
  Synthetic Polynucleotide

SEQ ID NO: 9097 - DNA, 1503 bp, Artificial Sequence; identical to SEQ ID NO: 4997
  Synthetic Polynucleotide

SEQ ID NO: 9098 - DNA, 1512 bp, Artificial Sequence; identical to SEQ ID NO: 4998
  Synthetic Polynucleotide

SEQ ID NO: 9099 - DNA, 1503 bp, Artificial Sequence; identical to SEQ ID NO: 4999
  Synthetic Polynucleotide

SEQ ID NO: 9100 - DNA, 1524 bp, Artificial Sequence; identical to SEQ ID NO: 5000
  Synthetic Polynucleotide

SEQ ID NO: 9101 - DNA, 1494 bp, Artificial Sequence; identical to SEQ ID NO: 5001
  Synthetic Polynucleotide

SEQ ID NO: 9102 - DNA, 1494 bp, Artificial Sequence; identical to SEQ ID NO: 5002
  Synthetic Polynucleotide

SEQ ID NO: 9103 - DNA, 1506 bp, Artificial Sequence; identical to SEQ ID NO: 5003
  Synthetic Polynucleotide

SEQ ID NO: 9104 - DNA, 1515 bp, Artificial Sequence; identical to SEQ ID NO: 5004
  Synthetic Polynucleotide

SEQ ID NO: 9105 - DNA, 1512 bp, Artificial Sequence; identical to SEQ ID NO: 5005
  Synthetic Polynucleotide

SEQ ID NO: 9106 - DNA, 1521 bp, Artificial Sequence; identical to SEQ ID NO: 5006
  Synthetic Polynucleotide

SEQ ID NO: 9107 - DNA, 1521 bp, Artificial Sequence; identical to SEQ ID NO: 5007
  Synthetic Polynucleotide

SEQ ID NO: 9108 - DNA, 1506 bp, Artificial Sequence; identical to SEQ ID NO: 5008
  Synthetic Polynucleotide

SEQ ID NO: 9109 - DNA, 1515 bp, Artificial Sequence; identical to SEQ ID NO: 5009
  Synthetic Polynucleotide

SEQ ID NO: 9110 - DNA, 1515 bp, Artificial Sequence; identical to SEQ ID NO: 5010
  Synthetic Polynucleotide

SEQ ID NO: 9111 - DNA, 1500 bp, Artificial Sequence; identical to SEQ ID NO: 5011
  Synthetic Polynucleotide

SEQ ID NO: 9112 - DNA, 1500 bp, Artificial Sequence; identical to SEQ ID NO: 5012
  Synthetic Polynucleotide

SEQ ID NO: 9113 - DNA, 1536 bp, Artificial Sequence; identical to SEQ ID NO: 5013
  Synthetic Polynucleotide

SEQ ID NO: 9114 - DNA, 1515 bp, Artificial Sequence; identical to SEQ ID NO: 5014
  Synthetic Polynucleotide

SEQ ID NO: 9115 - DNA, 1506 bp, Artificial Sequence; identical to SEQ ID NO: 5015
  Synthetic Polynucleotide

SEQ ID NO: 9116 - DNA, 1533 bp, Artificial Sequence; identical to SEQ ID NO: 5016
  Synthetic Polynucleotide

SEQ ID NO: 9117 - DNA, 1494 bp, Artificial Sequence; identical to SEQ ID NO: 5017
  Synthetic Polynucleotide

SEQ ID NO: 9118 - DNA, 1503 bp, Artificial Sequence; identical to SEQ ID NO: 5018
  Synthetic Polynucleotide

SEQ ID NO: 9119 - DNA, 1518 bp, Artificial Sequence; identical to SEQ ID NO: 5019
  Synthetic Polynucleotide

SEQ ID NO: 9120 - DNA, 1515 bp, Artificial Sequence; identical to SEQ ID NO: 5020
  Synthetic Polynucleotide

SEQ ID NO: 9121 - DNA, 1539 bp, Artificial Sequence; identical to SEQ ID NO: 5021
  Synthetic Polynucleotide

SEQ ID NO: 9122 - DNA, 1521 bp, Artificial Sequence; identical to SEQ ID NO: 5022
  Synthetic Polynucleotide

SEQ ID NO: 9123 - DNA, 1545 bp, Artificial Sequence; identical to SEQ ID NO: 5023
  Synthetic Polynucleotide

SEQ ID NO: 9124 - DNA, 1524 bp, Artificial Sequence; identical to SEQ ID NO: 5024
  Synthetic Polynucleotide

SEQ ID NO: 9125 - DNA, 1533 bp, Artificial Sequence; identical to SEQ ID NO: 5025
  Synthetic Polynucleotide

SEQ ID NO: 9126 - DNA, 1533 bp, Artificial Sequence; identical to SEQ ID NO: 5026
  Synthetic Polynucleotide

SEQ ID NO: 9127 - DNA, 1551 bp, Artificial Sequence; identical to SEQ ID NO: 5027
  Synthetic Polynucleotide

SEQ ID NO: 9128 - DNA, 1506 bp, Artificial Sequence; identical to SEQ ID NO: 5028
  Synthetic Polynucleotide

SEQ ID NO: 9129 - DNA, 1527 bp, Artificial Sequence; identical to SEQ ID NO: 5029
  Synthetic Polynucleotide

SEQ ID NO: 9130 - DNA, 1119 bp, Artificial Sequence; identical to SEQ ID NO: 5030
  Synthetic Polynucleotide

SEQ ID NO: 9131 - DNA, 1104 bp, Artificial Sequence; identical to SEQ ID NO: 5031
  Synthetic Polynucleotide

SEQ ID NO: 9132 - DNA, 1107 bp, Artificial Sequence; identical to SEQ ID NO: 5032
  Synthetic Polynucleotide

SEQ ID NO: 9133 - DNA, 1107 bp, Artificial Sequence; identical to SEQ ID NO: 5033
  Synthetic Polynucleotide

SEQ ID NO: 9134 - DNA, 1107 bp, Artificial Sequence; identical to SEQ ID NO: 5034
  Synthetic Polynucleotide

SEQ ID NO: 9135 - DNA, 1107 bp, Artificial Sequence; identical to SEQ ID NO: 5035
  Synthetic Polynucleotide

SEQ ID NO: 9136 - DNA, 1107 bp, Artificial Sequence; identical to SEQ ID NO: 5036
  Synthetic Polynucleotide

SEQ ID NO: 9137 - DNA, 1119 bp, Artificial Sequence; identical to SEQ ID NO: 5037
  Synthetic Polynucleotide

SEQ ID NO: 9138 - DNA, 1119 bp, Artificial Sequence; identical to SEQ ID NO: 5038
  Synthetic Polynucleotide

SEQ ID NO: 9139 - DNA, 1110 bp, Artificial Sequence; identical to SEQ ID NO: 5039
  Synthetic Polynucleotide

SEQ ID NO: 9140 - DNA, 1518 bp, Artificial Sequence
  Synthetic Polynucleotide
atggccttaccagtgaccgccttgctcctgccgctggccttgctgctccacgccgccaggccgagctacgtgctgacacagcctccatccgtgtctgtggctccaggacagaccgccagaatcacatgcggcggcaacaacatcggcagcaagagcgtgcactggtatcagcagccacctggacaggctccagtggtggtggtgtacgacgacagcgatagacctagcggcatccccgagagattcagcggcagcaattccggcaataccgccacactgaccatcagcagagtggaagctggcgacgaggccgtgtactactgccaagtgtgggacagcagcagcgatcacgtggtgtttggcggcggaacaaagctgacagtgcttggcggaggcggaagtggaggcggaggatctggcggcggaggctctcaactccagctgcaagagtctggccctggcctggtcaagcctagcgaaacactgagcctgacctgtaccgtgtctggcggctctatcagctccagcagctatttctggggctggatcagacaacctcctggcaaaggactggaatggatcggctccatctactacagcggcatcacctactacaaccccagcctgaagtccagagtgaccatctccgtggacaccagcaagaaccagttctccctgaagctgagcagcgtgacagccgccgataccgccgtgtattattgtgccagacatgacggcgctgtggccggcctgtttgattattggggacagggcaccctggtcaccgtgtcatctgctacgcgtggaatgaggactgaggatcttcccaaagctgtcgtctttctcgaaccccaatggtatcgggtgctcgaaaaagactctgtgacactgaaatgccaaggggcctactctcccgaggacaactccacacagtggtttcataatgagtccctcatcagctctcaggccagctcttatttcattgatgccgctacagtggacgactccggcgagtatcggtgtcagaccaatctgtctacactgtctgaccccgtgcagcttgaggtccacattggatggttgctcttgcaagccccacgctgggttttcaaagaggaagatccaatccatctgcggtgccacagctggaaaaacaccgctctccacaaagtcacatacctgcaaaatggcaaaggacgcaaatacttccatcacaattccgatttttacattccgaaggctaccctgaaagacagcggcagctatttctgccggggactcgtcggctccaagaatgtgtcctccgaaaccgtgaatatcacgattacccaaggactggctgtgcctacaatctctagcttctttccgcctggataccaagtctccttctgtcttgtgatggtcctcctgtttgctgtggacacaggactgtacttttccgtgaaaacgaacatccgcagctccacacgcgattggaaagatcacaagtttaaatggcgcaaagatccccaggacaag

SEQ ID NO: 9141 - DNA, 1518 bp, Artificial Sequence
  Synthetic Polynucleotide
atggccttaccagtgaccgccttgctcctgccgctggccttgctgctccacgccgccaggccgagctacgtgctgacacagcctccatccgtgtctgtggctccaggacagaccgccagaatcacatgcggcggcaacaacatcggcagcaagagcgtgcactggtatcagcagccacctggacaggctccagtggtggtggtgtacgacgacagcgatagacctagcggcatccccgagagattcagcggcagcaattccggcaataccgccacactgaccatcagcagagtggaagctggcgacgaggccgtgtactactgccaagtgtgggacagcagcagcgatcacgtggtgtttggcggcggaacaaagctgacagtgcttggcggaggcggaagtggaggcggaggatctggcggcggaggctctcaactccagctgcaagagtctggccctggcctggtcaagcctagcgaaacactgagcctgacctgtaccgtgtctggcggctctatcagctccggcagctatatctggggctggatcagacaacctcctggcaaaggactggaatggatcggctccatctactacagcggcatcacctactacaaccccagcctgaagtccagagtgaccatctccgtggacaccagcaagaaccagttctccctgaagctgagcagcgtgacagccgccgataccgccgtgtattattgtgccagacatgacggcgctgtggccggcctgtttgattattggggacagggcaccctggtcaccgtgtcatctgctacgcgtggaatgaggactgaggatcttcccaaagctgtcgtctttctcgaaccccaatggtatcgggtgctcgaaaaagactctgtgacactgaaatgccaaggggcctactctcccgaggacaactccacacagtggtttcataatgagtccctcatcagctctcaggccagctcttatttcattgatgccgctacagtggacgactccggcgagtatcggtgtcagaccaatctgtctacactgtctgaccccgtgcagcttgaggtccacattggatggttgctcttgcaagccccacgctgggttttcaaagaggaagatccaatccatctgcggtgccacagctggaaaaacaccgctctccacaaagtcacatacctgcaaaatggcaaaggacgcaaatacttccatcacaattccgatttttacattccgaaggctaccctgaaagacagcggcagctatttctgccggggactcgtcggctccaagaatgtgtcctccgaaaccgtgaatatcacgattacccaaggactggctgtgcctacaatctctagcttctttccgcctggataccaagtctccttctgtcttgtgatggtcctcctgtttgctgtggacacaggactgtacttttccgtgaaaacgaacatccgcagctccacacgcgattggaaagatcacaagtttaaatggcgcaaagatccccaggacaag

SEQ ID NO: 9142 - DNA, 1518 bp, Artificial Sequence
  Synthetic Polynucleotide
atggccttaccagtgaccgccttgctcctgccgctggccttgctgctccacgccgccaggccgagctacgtgctgacacagcctccatccgtgtctgtggctccaggacagaccgccagaatcacatgcggcggcaacaacatcggcagcaagagcgtgcactggtatcagcagccacctggacaggctccagtggtggtggtgtacgacgacagcgatagacctagcggcatccccgagagattcagcggcagcaattccggcaataccgccacactgaccatcagcagagtggaagctggcgacgaggccgtgtactactgccaagtgtgggacagcagcagcgatcacgtggtgtttggcggcggaacaaagctgacagtgcttggcggaggcggaagtggaggcggaggatctggcggcggaggctctcaactccagctgcaagagtctggccctggcctggtcaagcctagcgaaacactgagcctgacctgtaccgtgtctggcggctctatcagctccggcagctatttctggggctggatcagacaacctcctggcaaaggactggaatggatcggctccatctactacagcggcatcacctactacaaccccagcctgaagtccagagtgaccatctccgtggacaccagcaagaaccagttctccctgaagctgagcagcgtgacagccgccgataccgccgtgtattattgtgccagacatgacggcgctatggccggcctgtttgattattggggacagggcaccctggtcaccgtgtcatctgctacgcgtggaatgaggactgaggatcttcccaaagctgtcgtctttctcgaaccccaatggtatcgggtgctcgaaaaagactctgtgacactgaaatgccaaggggcctactctcccgaggacaactccacacagtggtttcataatgagtccctcatcagctctcaggccagctcttatttcattgatgccgctacagtggacgactccggcgagtatcggtgtcagaccaatctgtctacactgtctgaccccgtgcagcttgaggtccacattggatggttgctcttgcaagccccacgctgggttttcaaagaggaagatccaatccatctgcggtgccacagctggaaaaacaccgctctccacaaagtcacatacctgcaaaatggcaaaggacgcaaatacttccatcacaattccgatttttacattccgaaggctaccctgaaagacagcggcagctatttctgccggggactcgtcggctccaagaatgtgtcctccgaaaccgtgaatatcacgattacccaaggactggctgtgcctacaatctctagcttctttccgcctggataccaagtctccttctgtcttgtgatggtcctcctgtttgctgtggacacaggactgtacttttccgtgaaaacgaacatccgcagctccacacgcgattggaaagatcacaagtttaaatggcgcaaagatccccaggacaag

SEQ ID NO: 9143 - DNA, 1518 bp, Artificial Sequence
  Synthetic Polynucleotide
atggccttaccagtgaccgccttgctcctgccgctggccttgctgctccacgccgccaggccgagctacgtgctgacacagcctccatccgtgtctgtggctccaggacagaccgccagaatcacatgcggcggcaacaacatcggcagcaagagcgtgcactggtatcagcagccacctggacaggctccagtggtggtggtgtacgacgacagcgatagacctagcggcatccccgagagattcagcggcagcaattccggcaataccgccacactgaccatcagcagagtggaagctggcgacgaggccgtgtactactgccaagtgtgggacagcagcagcgatcacgtggtgtttggcggcggaacaaagctgacagtgcttggcggaggcggaagtggaggcggaggatctggcggcggaggctctcaactccagctgcaagagtctggccctggcctggtcaagcctagcgaaacactgagcctgacctgtaccgtgtctggcggctctatcagctccggcagctatttctggggctggatcagacaacctcctggcaaaggactggaatggatcggctccatctactacagcggcagcacctactacaaccccagcctgaagtccagagtgaccatctccgtggacaccagcaagaaccagttctccctgaagctgagcagcgtgacagccgccgataccgccgtgtattattgtgccagacatgacggcgctgtggccggcctgtttgattattggggacagggcaccctggtcaccgtgtcatctgctacgcgtggaatgaggactgaggatcttcccaaagctgtcgtctttctcgaaccccaatggtatcgggtgctcgaaaaagactctgtgacactgaaatgccaaggggcctactctcccgaggacaactccacacagtggtttcataatgagtccctcatcagctctcaggccagctcttatttcattgatgccgctacagtggacgactccggcgagtatcggtgtcagaccaatctgtctacactgtctgaccccgtgcagcttgaggtccacattggatggttgctcttgcaagccccacgctgggttttcaaagaggaagatccaatccatctgcggtgccacagctggaaaaacaccgctctccacaaagtcacatacctgcaaaatggcaaaggacgcaaatacttccatcacaattccgatttttacattccgaaggctaccctgaaagacagcggcagctatttctgccggggactcgtcggctccaagaatgtgtcctccgaaaccgtgaatatcacgattacccaaggactggctgtgcctacaatctctagcttctttccgcctggataccaagtctccttctgtcttgtgatggtcctcctgtttgctgtggacacaggactgtacttttccgtgaaaacgaacatccgcagctccacacgcgattggaaagatcacaagtttaaatggcgcaaagatccccaggacaag

SEQ ID NO: 9144 - DNA, 1518 bp, Artificial Sequence
  Synthetic Polynucleotide
atggccttaccagtgaccgccttgctcctgccgctggccttgctgctccacgccgccaggccgagctacgtgctgacacagcctccatccgtgtctgtggctccaggacagaccgccagaatcacatgcggcggcaacaacatcggcagcaagagcgtgcactggtatcagcagccacctggacaggctccagtggtggtggtgtacgacgacagcgatagacctagcggcatccccgagagattcagcggcagcaattccggcaataccgccacactgaccatcagcagagtggaagctggcgacgaggccgtgtactactgccaagtgtgggacagcagcagcgatcacgtggtgtttggcggcggaacaaagctgacagtgcttggcggaggcggaagtggaggcggaggatctggcggcggaggctctcaactccagctgcaagagtctggccctggcctggtcaagcctagcgaaacactgagcctgacctgtaccgtgtctggcggctctatcagctccggcagctatttctggggctggatcagacaacctcctggcaaaggactggaatggatcggctccatctactacagcggcatcagctactacaaccccagcctgaagtccagagtgaccatctccgtggacaccagcaagaaccagttctccctgaagctgagcagcgtgacagccgccgataccgccgtgtattattgtgccagacatgacggcgctgtggccggcctgtttgattattggggacagggcaccctggtcaccgtgtcatctgctacgcgtggaatgaggactgaggatcttcccaaagctgtcgtctttctcgaaccccaatggtatcgggtgctcgaaaaagactctgtgacactgaaatgccaaggggcctactctcccgaggacaactccacacagtggtttcataatgagtccctcatcagctctcaggccagctcttatttcattgatgccgctacagtggacgactccggcgagtatcggtgtcagaccaatctgtctacactgtctgaccccgtgcagcttgaggtccacattggatggttgctcttgcaagccccacgctgggttttcaaagaggaagatccaatccatctgcggtgccacagctggaaaaacaccgctctccacaaagtcacatacctgcaaaatggcaaaggacgcaaatacttccatcacaattccgatttttacattccgaaggctaccctgaaagacagcggcagctatttctgccggggactcgtcggctccaagaatgtgtcctccgaaaccgtgaatatcacgattacccaaggactggctgtgcctacaatctctagcttctttccgcctggataccaagtctccttctgtcttgtgatggtcctcctgtttgctgtggacacaggactgtacttttccgtgaaaacgaacatccgcagctccacacgcgattggaaagatcacaagtttaaatggcgcaaagatccccaggacaag

SEQ ID NO: 9145 - DNA, 1518 bp, Artificial Sequence
  Synthetic Polynucleotide
atggccttaccagtgaccgccttgctcctgccgctggccttgctgctccacgccgccaggccgagctacgtgctgacacagcctccatccgtgtctgtggctccaggacagaccgccagaatcacatgcggcggcaacaacatcggcagcaagagcgtgcactggtatcagcagccacctggacaggctccagtggtggtggtgtacgacgacagcgatagacctagcggcatccccgagagattcagcggcagcaattccggcaataccgccacactgaccatcagcagagtggaagctggcgacgaggccgtgtactactgccaagtgtgggacagcagcagcgatcacgtggtgtttggcggcggaacaaagctgacagtgcttggcggaggcggaagtggaggcggaggatctggcggcggaggctctcaactccagctgcaagagtctggccctggcctggtcaagcctagcgaaacactgagcctgacctgtaccgtgtctggcggctctatcagctccggcagctatttctggggctggatcagacaacctcctggcaaaggactggaatggatcggctccatctactacagcggcatcacctactacaaccccggcctgaagtccagagtgaccatctccgtggacaccagcaagaaccagttctccctgaagctgagcagcgtgacagccgccgataccgccgtgtattattgtgccagacatgacggcgctgtggccggcctgtttgattattggggacagggcaccctggtcaccgtgtcatctgctacgcgtggaatgaggactgaggatcttcccaaagctgtcgtctttctcgaaccccaatggtatcgggtgctcgaaaaagactctgtgacactgaaatgccaaggggcctactctcccgaggacaactccacacagtggtttcataatgagtccctcatcagctctcaggccagctcttatttcattgatgccgctacagtggacgactccggcgagtatcggtgtcagaccaatctgtctacactgtctgaccccgtgcagcttgaggtccacattggatggttgctcttgcaagccccacgctgggttttcaaagaggaagatccaatccatctgcggtgccacagctggaaaaacaccgctctccacaaagtcacatacctgcaaaatggcaaaggacgcaaatacttccatcacaattccgatttttacattccgaaggctaccctgaaagacagcggcagctatttctgccggggactcgtcggctccaagaatgtgtcctccgaaaccgtgaatatcacgattacccaaggactggctgtgcctacaatctctagcttctttccgcctggataccaagtctccttctgtcttgtgatggtcctcctgtttgctgtggacacaggactgtacttttccgtgaaaacgaacatccgcagctccacacgcgattggaaagatcacaagtttaaatggcgcaaagatccccaggacaag

SEQ ID NO: 9146 - DNA, 1518 bp, Artificial Sequence
  Synthetic Polynucleotide
atggccttaccagtgaccgccttgctcctgccgctggccttgctgctccacgccgccaggccgagctacgtgctgacacagcctccatccgtgtctgtggctccaggacagaccgccagaatcacatgcggcggcaacaacatcggcagcaagagcgtgcactggtatcagcagccacctggacaggctccagtggtggtggtgtacgacgacagcgatagacctagcggcatccccgagagattcagcggcagcaattccggcaataccgccacactgaccatcagcagagtggaagctggcgacgaggccgtgtactactgccaagtgtgggacagcagcagcgatcacgtggtgtttggcggcggaacaaagctgacagtgcttggcggaggcggaagtggaggcggaggatctggcggcggaggctctcaactccagctgcaagagtctggccctggcctggtcaagcctagcgaaacactgagcctgacctgtaccgtgtctggcggctctatcagctccggcagctatttctggggctggatcagacaacctcctggcaaaggactggaatggatcggctccatctactacagcggcatcacctactacaaccccaccctgaagtccagagtgaccatctccgtggacaccagcaagaaccagttctccctgaagctgagcagcgtgacagccgccgataccgccgtgtattattgtgccagacatgacggcgctgtggccggcctgtttgattattggggacagggcaccctggtcaccgtgtcatctgctacgcgtggaatgaggactgaggatcttcccaaagctgtcgtctttctcgaaccccaatggtatcgggtgctcgaaaaagactctgtgacactgaaatgccaaggggcctactctcccgaggacaactccacacagtggtttcataatgagtccctcatcagctctcaggccagctcttatttcattgatgccgctacagtggacgactccggcgagtatcggtgtcagaccaatctgtctacactgtctgaccccgtgcagcttgaggtccacattggatggttgctcttgcaagccccacgctgggttttcaaagaggaagatccaatccatctgcggtgccacagctggaaaaacaccgctctccacaaagtcacatacctgcaaaatggcaaaggacgcaaatacttccatcacaattccgatttttacattccgaaggctaccctgaaagacagcggcagctatttctgccggggactcgtcggctccaagaatgtgtcctccgaaaccgtgaatatcacgattacccaaggactggctgtgcctacaatctctagcttctttccgcctggataccaagtctccttctgtcttgtgatggtcctcctgtttgctgtggacacaggactgtacttttccgtgaaaacgaacatccgcagctccacacgcgattggaaagatcacaagtttaaatggcgcaaagatccccaggacaag

SEQ ID NO: 9147 - DNA, 1518 bp, Artificial Sequence
  Synthetic Polynucleotide
atggccttaccagtgaccgccttgctcctgccgctggccttgctgctccacgccgccaggccgagctacgtgctgacacagcctccatccgtgtctgtggctccaggacagaccgccagaatcacatgcggcggcaagaacatcggcagcaagagcgtgcactggtatcagcagccacctggacaggctccagtggtggtggtgtacgacgacagcgatagacctagcggcatccccgagagattcagcggcagcaattccggcaataccgccacactgaccatcagcagagtggaagctggcgacgaggccgtgtactactgccaagtgtgggacagcagcagcgatcacgtggtgtttggcggcggaacaaagctgacagtgcttggcggaggcggaagtggaggcggaggatctggcggcggaggctctcaactccagctgcaagagtctggccctggcctggtcaagcctagcgaaacactgagcctgacctgtaccgtgtctggcggctctatcagctccggcagctatttctggggctggatcagacaacctcctggcaaaggactggaatggatcggctccatctactacagcggcatcacctactacaaccccagcctgaagtccagagtgaccatctccgtggacaccagcaagaaccagttctccctgaagctgagcagcgtgacagccgccgataccgccgtgtattattgtgccagacatgacggcgctgtggccggcctgtttgattattggggacagggcaccctggtcaccgtgtcatctgctacgcgtggaatgaggactgaggatcttcccaaagctgtcgtctttctcgaaccccaatggtatcgggtgctcgaaaaagactctgtgacactgaaatgccaaggggcctactctcccgaggacaactccacacagtggtttcataatgagtccctcatcagctctcaggccagctcttatttcattgatgccgctacagtggacgactccggcgagtatcggtgtcagaccaatctgtctacactgtctgaccccgtgcagcttgaggtccacattggatggttgctcttgcaagccccacgctgggttttcaaagaggaagatccaatccatctgcggtgccacagctggaaaaacaccgctctccacaaagtcacatacctgcaaaatggcaaaggacgcaaatacttccatcacaattccgatttttacattccgaaggctaccctgaaagacagcggcagctatttctgccggggactcgtcggctccaagaatgtgtcctccgaaaccgtgaatatcacgattacccaaggactggctgtgcctacaatctctagcttctttccgcctggataccaagtctccttctgtcttgtgatggtcctcctgtttgctgtggacacaggactgtacttttccgtgaaaacgaacatccgcagctccacacgcgattggaaagatcacaagtttaaatggcgcaaagatccccaggacaag

SEQ ID NO: 9148 - DNA, 1518 bp, Artificial Sequence
  Synthetic Polynucleotide
atggccttaccagtgaccgccttgctcctgccgctggccttgctgctccacgccgccaggccgagctacgtgctgacacagcctccatccgtgtctgtggctccaggacagaccgccagaatcacatgcggcggcaacaacctcggcagcaagagcgtgcactggtatcagcagccacctggacaggctccagtggtggtggtgtacgacgacagcgatagacctagcggcatccccgagagattcagcggcagcaattccggcaataccgccacactgaccatcagcagagtggaagctggcgacgaggccgtgtactactgccaagtgtgggacagcagcagcgatcacgtggtgtttggcggcggaacaaagctgacagtgcttggcggaggcggaagtggaggcggaggatctggcggcggaggctctcaactccagctgcaagagtctggccctggcctggtcaagcctagcgaaacactgagcctgacctgtaccgtgtctggcggctctatcagctccggcagctatttctggggctggatcagacaacctcctggcaaaggactggaatggatcggctccatctactacagcggcatcacctactacaaccccagcctgaagtccagagtgaccatctccgtggacaccagcaagaaccagttctccctgaagctgagcagcgtgacagccgccgataccgccgtgtattattgtgccagacatgacggcgctgtggccggcctgtttgattattggggacagggcaccctggtcaccgtgtcatctgctacgcgtggaatgaggactgaggatcttcccaaagctgtcgtctttctcgaaccccaatggtatcgggtgctcgaaaaagactctgtgacactgaaatgccaaggggcctactctcccgaggacaactccacacagtggtttcataatgagtccctcatcagctctcaggccagctcttatttcattgatgccgctacagtggacgactccggcgagtatcggtgtcagaccaatctgtctacactgtctgaccccgtgcagcttgaggtccacattggatggttgctcttgcaagccccacgctgggttttcaaagaggaagatccaatccatctgcggtgccacagctggaaaaacaccgctctccacaaagtcacatacctgcaaaatggcaaaggacgcaaatacttccatcacaattccgatttttacattccgaaggctaccctgaaagacagcggcagctatttctgccggggactcgtcggctccaagaatgtgtcctccgaaaccgtgaatatcacgattacccaaggactggctgtgcctacaatctctagcttctttccgcctggataccaagtctccttctgtcttgtgatggtcctcctgtttgctgtggacacaggactgtacttttccgtgaaaacgaacatccgcagctccacacgcgattggaaagatcacaagtttaaatggcgcaaagatccccaggacaag

SEQ ID NO: 9149 - DNA, 1518 bp, Artificial Sequence
  Synthetic Polynucleotide
atggccttaccagtgaccgccttgctcctgccgctggccttgctgctccacgccgccaggccgagctacgtgctgacacagcctccatccgtgtctgtggctccaggacagaccgccagaatcacatgcggcggcaacaacatcggcggcaagagcgtgcactggtatcagcagccacctggacaggctccagtggtggtggtgtacgacgacagcgatagacctagcggcatccccgagagattcagcggcagcaattccggcaataccgccacactgaccatcagcagagtggaagctggcgacgaggccgtgtactactgccaagtgtgggacagcagcagcgatcacgtggtgtttggcggcggaacaaagctgacagtgcttggcggaggcggaagtggaggcggaggatctggcggcggaggctctcaactccagctgcaagagtctggccctggcctggtcaagcctagcgaaacactgagcctgacctgtaccgtgtctggcggctctatcagctccggcagctatttctggggctggatcagacaacctcctggcaaaggactggaatggatcggctccatctactacagcggcatcacctactacaaccccagcctgaagtccagagtgaccatctccgtggacaccagcaagaaccagttctccctgaagctgagcagcgtgacagccgccgataccgccgtgtattattgtgccagacatgacggcgctgtggccggcctgtttgattattggggacagggcaccctggtcaccgtgtcatctgctacgcgtggaatgaggactgaggatcttcccaaagctgtcgtctttctcgaaccccaatggtatcgggtgctcgaaaaagactctgtgacactgaaatgccaaggggcctactctcccgaggacaactccacacagtggtttcataatgagtccctcatcagctctcaggccagctcttatttcattgatgccgctacagtggacgactccggcgagtatcggtgtcagaccaatctgtctacactgtctgaccccgtgcagcttgaggtccacattggatggttgctcttgcaagccccacgctgggttttcaaagaggaagatccaatccatctgcggtgccacagctggaaaaacaccgctctccacaaagtcacatacctgcaaaatggcaaaggacgcaaatacttccatcacaattccgatttttacattccgaaggctaccctgaaagacagcggcagctatttctgccggggactcgtcggctccaagaatgtgtcctccgaaaccgtgaatatcacgattacccaaggactggctgtgcctacaatctctagcttctttccgcctggataccaagtctccttctgtcttgtgatggtcctcctgtttgctgtggacacaggactgtacttttccgtgaaaacgaacatccgcagctccacacgcgattggaaagatcacaagtttaaatggcgcaaagatccccaggacaag

SEQ ID NO: 9150 - DNA, 1518 bp, Artificial Sequence
  Synthetic Polynucleotide
atggccttaccagtgaccgccttgctcctgccgctggccttgctgctccacgccgccaggccgagctacgtgctgacacagcctccatccgtgtctgtggctccaggacagaccgccagaatcacatgcggcggcaacaacatcggcagcaagaccgtgcactggtatcagcagccacctggacaggctccagtggtggtggtgtacgacgacagcgatagacctagcggcatccccgagagattcagcggcagcaattccggcaataccgccacactgaccatcagcagagtggaagctggcgacgaggccgtgtactactgccaagtgtgggacagcagcagcgatcacgtggtgtttggcggcggaacaaagctgacagtgcttggcggaggcggaagtggaggcggaggatctggcggcggaggctctcaactccagctgcaagagtctggccctggcctggtcaagcctagcgaaacactgagcctgacctgtaccgtgtctggcggctctatcagctccggcagctatttctggggctggatcagacaacctcctggcaaaggactggaatggatcggctccatctactacagcggcatcacctactacaaccccagcctgaagtccagagtgaccatctccgtggacaccagcaagaaccagttctccctgaagctgagcagcgtgacagccgccgataccgccgtgtattattgtgccagacatgacggcgctgtggccggcctgtttgattattggggacagggcaccctggtcaccgtgtcatctgctacgcgtggaatgaggactgaggatcttcccaaagctgtcgtctttctcgaaccccaatggtatcgggtgctcgaaaaagactctgtgacactgaaatgccaaggggcctactctcccgaggacaactccacacagtggtttcataatgagtccctcatcagctctcaggccagctcttatttcattgatgccgctacagtggacgactccggcgagtatcggtgtcagaccaatctgtctacactgtctgaccccgtgcagcttgaggtccacattggatggttgctcttgcaagccccacgctgggttttcaaagaggaagatccaatccatctgcggtgccacagctggaaaaacaccgctctccacaaagtcacatacctgcaaaatggcaaaggacgcaaatacttccatcacaattccgatttttacattccgaaggctaccctgaaagacagcggcagctatttctgccggggactcgtcggctccaagaatgtgtcctccgaaaccgtgaatatcacgattacccaaggactggctgtgcctacaatctctagcttctttccgcctggataccaagtctccttctgtcttgtgatggtcctcctgtttgctgtggacacaggactgtacttttccgtgaaaacgaacatccgcagctccacacgcgattggaaagatcacaagtttaaatggcgcaaagatccccaggacaag

SEQ ID NO: 9151 - DNA, 1518 bp, Artificial Sequence
  Synthetic Polynucleotide
atggccttaccagtgaccgccttgctcctgccgctggccttgctgctccacgccgccaggccgagctacgtgctgacacagcctccatccgtgtctgtggctccaggacagaccgccagaatcacatgcggcggcaagaacatcggcagcaagagcgtgcactggtatcagcagccacctggacaggctccagtggtggtggtgtacgacgacagcgatagacctagcggcatccccgagagattcagcggcagcaattccggcaataccgccacactgaccatcagcagagtggaagctggcgacgaggccgtgtactactgccaagtgtgggacagcagcagcgatcacgtggtgtttggcggcggaacaaagctgacagtgcttggcggaggcggaagtggaggcggaggatctggcggcggaggctctcaactccagctgcaagagtctggccctggcctggtcaagcctagcgaaacactgagcctgacctgtaccgtgtctggcggctctatcagctccagcagctatttctggggctggatcagacaacctcctggcaaaggactggaatggatcggctccatctactacagcggcatcacctactacaaccccagcctgaagtccagagtgaccatctccgtggacaccagcaagaaccagttctccctgaagctgagcagcgtgacagccgccgataccgccgtgtattattgtgccagacatgacggcgctgtggccggcctgtttgattattggggacagggcaccctggtcaccgtgtcatctgctacgcgtggaatgaggactgaggatcttcccaaagctgtcgtctttctcgaaccccaatggtatcgggtgctcgaaaaagactctgtgacactgaaatgccaaggggcctactctcccgaggacaactccacacagtggtttcataatgagtccctcatcagctctcaggccagctcttatttcattgatgccgctacagtggacgactccggcgagtatcggtgtcagaccaatctgtctacactgtctgaccccgtgcagcttgaggtccacattggatggttgctcttgcaagccccacgctgggttttcaaagaggaagatccaatccatctgcggtgccacagctggaaaaacaccgctctccacaaagtcacatacctgcaaaatggcaaaggacgcaaatacttccatcacaattccgatttttacattccgaaggctaccctgaaagacagcggcagctatttctgccggggactcgtcggctccaagaatgtgtcctccgaaaccgtgaatatcacgattacccaaggactggctgtgcctacaatctctagcttctttccgcctggataccaagtctccttctgtcttgtgatggtcctcctgtttgctgtggacacaggactgtacttttccgtgaaaacgaacatccgcagctccacacgcgattggaaagatcacaagtttaaatggcgcaaagatccccaggacaag

SEQ ID NO: 9152 - DNA, 1518 bp, Artificial Sequence
  Synthetic Polynucleotide
atggccttaccagtgaccgccttgctcctgccgctggccttgctgctccacgccgccaggccgagctacgtgctgacacagcctccatccgtgtctgtggctccaggacagaccgccagaatcacatgcggcggcaacaacctcggcagcaagagcgtgcactggtatcagcagccacctggacaggctccagtggtggtggtgtacgacgacagcgatagacctagcggcatccccgagagattcagcggcagcaattccggcaataccgccacactgaccatcagcagagtggaagctggcgacgaggccgtgtactactgccaagtgtgggacagcagcagcgatcacgtggtgtttggcggcggaacaaagctgacagtgcttggcggaggcggaagtggaggcggaggatctggcggcggaggctctcaactccagctgcaagagtctggccctggcctggtcaagcctagcgaaacactgagcctgacctgtaccgtgtctggcggctctatcagctccagcagctatttctggggctggatcagacaacctcctggcaaaggactggaatggatcggctccatctactacagcggcatcacctactacaaccccagcctgaagtccagagtgaccatctccgtggacaccagcaagaaccagttctccctgaagctgagcagcgtgacagccgccgataccgccgtgtattattgtgccagacatgacggcgctgtggccggcctgtttgattattggggacagggcaccctggtcaccgtgtcatctgctacgcgtggaatgaggactgaggatcttcccaaagctgtcgtctttctcgaaccccaatggtatcgggtgctcgaaaaagactctgtgacactgaaatgccaaggggcctactctcccgaggacaactccacacagtggtttcataatgagtccctcatcagctctcaggccagctcttatttcattgatgccgctacagtggacgactccggcgagtatcggtgtcagaccaatctgtctacactgtctgaccccgtgcagcttgaggtccacattggatggttgctcttgcaagccccacgctgggttttcaaagaggaagatccaatccatctgcggtgccacagctggaaaaacaccgctctccacaaagtcacatacctgcaaaatggcaaaggacgcaaatacttccatcacaattccgatttttacattccgaaggctaccctgaaagacagcggcagctatttctgccggggactcgtcggctccaagaatgtgtcctccgaaaccgtgaatatcacgattacccaaggactggctgtgcctacaatctctagcttctttccgcctggataccaagtctccttctgtcttgtgatggtcctcctgtttgctgtggacacaggactgtacttttccgtgaaaacgaacatccgcagctccacacgcgattggaaagatcacaagtttaaatggcgcaaagatccccaggacaag

SEQ ID NO: 9153 - DNA, 1518 bp, Artificial Sequence
  Synthetic Polynucleotide
atggccttaccagtgaccgccttgctcctgccgctggccttgctgctccacgccgccaggccgagctacgtgctgacacagcctccatccgtgtctgtggctccaggacagaccgccagaatcacatgcggcggcaacaacatcggcggcaagagcgtgcactggtatcagcagccacctggacaggctccagtggtggtggtgtacgacgacagcgatagacctagcggcatccccgagagattcagcggcagcaattccggcaataccgccacactgaccatcagcagagtggaagctggcgacgaggccgtgtactactgccaagtgtgggacagcagcagcgatcacgtggtgtttggcggcggaacaaagctgacagtgcttggcggaggcggaagtggaggcggaggatctggcggcggaggctctcaactccagctgcaagagtctggccctggcctggtcaagcctagcgaaacactgagcctgacctgtaccgtgtctggcggctctatcagctccagcagctatttctggggctggatcagacaacctcctggcaaaggactggaatggatcggctccatctactacagcggcatcacctactacaaccccagcctgaagtccagagtgaccatctccgtggacaccagcaagaaccagttctccctgaagctgagcagcgtgacagccgccgataccgccgtgtattattgtgccagacatgacggcgctgtggccggcctgtttgattattggggacagggcaccctggtcaccgtgtcatctgctacgcgtggaatgaggactgaggatcttcccaaagctgtcgtctttctcgaaccccaatggtatcgggtgctcgaaaaagactctgtgacactgaaatgccaaggggcctactctcccgaggacaactccacacagtggtttcataatgagtccctcatcagctctcaggccagctcttatttcattgatgccgctacagtggacgactccggcgagtatcggtgtcagaccaatctgtctacactgtctgaccccgtgcagcttgaggtccacattggatggttgctcttgcaagccccacgctgggttttcaaagaggaagatccaatccatctgcggtgccacagctggaaaaacaccgctctccacaaagtcacatacctgcaaaatggcaaaggacgcaaatacttccatcacaattccgatttttacattccgaaggctaccctgaaagacagcggcagctatttctgccggggactcgtcggctccaagaatgtgtcctccgaaaccgtgaatatcacgattacccaaggactggctgtgcctacaatctctagcttctttccgcctggataccaagtctccttctgtcttgtgatggtcctcctgtttgctgtggacacaggactgtacttttccgtgaaaacgaacatccgcagctccacacgcgattggaaagatcacaagtttaaatggcgcaaagatccccaggacaag

SEQ ID NO: 9154 - DNA, 1509 bp, Artificial Sequence
  Synthetic Polynucleotide
atggccttaccagtgaccgccttgctcctgccgctggccttgctgctccacgccgccaggccggagatcgtgctgacacagtctcccgccacactgtcactgtctccaggcgaaagagccacactgagctgtagagccagccagagcgtgtcctcttacctggcctggtatcagcagaagcctggacaggctccccggctgctgatctacgatgccagcaatagagccacaggcatccccgccagattttctggctctggcagcggcaccgatttcaccctgaccataagcagcctggaacctgaggacttcgccgtgtactactgccagcagagaagcaactggcccctgacctttggacagggcaccaaggtggaaatcaaaggcggaggcggaagtggaggcggaggatctggcggcggaggctctcaagttcagctggttcagagcggagccgaagtgaagaaacctggcagcagcgtgaaggtgtcctgcaaagcaagcggcggcacctttagcacctacgccatccactgggttcgacaggcaccaggacaaggactggaatggatgggcagaatcatccccatcgagggcagagcctactacgcccagaaattccagggcagagtgaccatcaccgccgacgagtctacaagcaccgcctacatggaactgagcagcctgagaagcgaggataccgctgtgtactattgcgccagaggccggtacagctacagatattggttcgactactggggccagggcaccctggttacagtctcttctacgcgtggaatgaggactgaggatcttcccaaagctgtcgtctttctcgaaccccaatggtatcgggtgctcgaaaaagactctgtgacactgaaatgccaaggggcctactctcccgaggacaactccacacagtggtttcataatgagtccctcatcagctctcaggccagctcttatttcattgatgccgctacagtggacgactccggcgagtatcggtgtcagaccaatctgtctacactgtctgaccccgtgcagcttgaggtccacattggatggttgctcttgcaagccccacgctgggttttcaaagaggaagatccaatccatctgcggtgccacagctggaaaaacaccgctctccacaaagtcacatacctgcaaaatggcaaaggacgcaaatacttccatcacaattccgatttttacattccgaaggctaccctgaaagacagcggcagctatttctgccggggactcgtcggctccaagaatgtgtcctccgaaaccgtgaatatcacgattacccaaggactggctgtgcctacaatctctagcttctttccgcctggataccaagtctccttctgtcttgtgatggtcctcctgtttgctgtggacacaggactgtacttttccgtgaaaacgaacatccgcagctccacacgcgattggaaagatcacaagtttaaatggcgcaaagatccccaggacaag

SEQ ID NO: 9155 - DNA, 1533 bp, Artificial Sequence
  Synthetic Polynucleotide
atggccttaccagtgaccgccttgctcctgccgctggccttgctgctccacgccgccaggccggacatcgtgatgacacagagccctgatagcctggccgtgtctctgggagagagagccaccatcaactgcaagagcagccagagcgtgctgtactccagcaacaacaagaactacctggcctggtatcagcagaagcccggccagcctcctaagctgctgatctactgggccagcaccagagaaagcggcgtgcccgatagattttctggcagcggctctggcaccgacttcaccctgacaattagcagcctccaggccgaggatgtggccgtgtactactgccagcagtattacagcacccctctgaccttcggccagggcaccaaggtggaaatcaaaggcggaggcggaagtggaggcggaggatctggcggcggaggctctgaagttcagctggttcagagcggagccgaagtgaagaagccaggcgagagcctgaagattagctgcaaaggctccggctacagcttcaccagctactggatcggctgggtccgacagatgcctggcaaaggactggaatggatgggcatcatctaccccggcgacagcgacaccagatacagccctagctttcagggccaagtgaccatcagcgccgacaagagcatcagcacagcctacctccagtggtcctctctgaaggccagcgataccgccatgtactattgcgccagagatgtcggcagatgggctcctggcggcttcctggattattggggacagggcacactggtcaccgtgtctagtacgcgtggaatgaggactgaggatcttcccaaagctgtcgtctttctcgaaccccaatggtatcgggtgctcgaaaaagactctgtgacactgaaatgccaaggggcctactctcccgaggacaactccacacagtggtttcataatgagtccctcatcagctctcaggccagctcttatttcattgatgccgctacagtggacgactccggcgagtatcggtgtcagaccaatctgtctacactgtctgaccccgtgcagcttgaggtccacattggatggttgctcttgcaagccccacgctgggttttcaaagaggaagatccaatccatctgcggtgccacagctggaaaaacaccgctctccacaaagtcacatacctgcaaaatggcaaaggacgcaaatacttccatcacaattccgatttttacattccgaaggctaccctgaaagacagcggcagctatttctgccggggactcgtcggctccaagaatgtgtcctccgaaaccgtgaatatcacgattacccaaggactggctgtgcctacaatctctagcttctttccgcctggataccaagtctccttctgtcttgtgatggtcctcctgtttgctgtggacacaggactgtacttttccgtgaaaacgaacatccgcagctccacacgcgattggaaagatcacaagtttaaatggcgcaaagatccccaggacaag

SEQ ID NO: 9156 - DNA, 1506 bp, Artificial Sequence
  Synthetic Polynucleotide
atggccttaccagtgaccgccttgctcctgccgctggccttgctgctccacgccgccaggccggacatccagatgacacagagccctagcagcctgtctgccagcgtgggagacagagtgaccatcacctgtagagccagccagagcatcaacaagtggctgaactggtatcagcagaagcccggcaaggcccctaagctgctgatctatgccgccagctctctccagagcggagtgcctagcagattttctggcagcggctccggcaccgatttcaccctgacaatatccagcctccagcctgaggacttcgccacctactactgccagcaggactacaacttcccctacaccttcggccagggcaccaaggtggaaatcaaaagaggcggaggcggaagtggaggcggaggatctggcggcggaggctctcaagttcagctggttcagagcggcgctgaagtgaagaaacctggcagcagcgtgaaggtgtcctgcaaagcaagcggcggcacctttagcagctacggcatctcttgggtccgacaggctcctggacaaggactggaatggatgggctggatcagcgccatcttcggcacagccaattacgcccagaaattccagggccgcgtgacaatcacagccgacgagtctacaagcaccgcctacatggaactgagcagcctgagaagcgaggacaccgccgtgtactattgtgccagaggcgtggcctcctggtatctggattattggggccagggaaccctggtcaccgtgtcatctacgcgtggaatgaggactgaggatcttcccaaagctgtcgtctttctcgaaccccaatggtatcgggtgctcgaaaaagactctgtgacactgaaatgccaaggggcctactctcccgaggacaactccacacagtggtttcataatgagtccctcatcagctctcaggccagctcttatttcattgatgccgctacagtggacgactccggcgagtatcggtgtcagaccaatctgtctacactgtctgaccccgtgcagcttgaggtccacattggatggttgctcttgcaagccccacgctgggttttcaaagaggaagatccaatccatctgcggtgccacagctggaaaaacaccgctctccacaaagtcacatacctgcaaaatggcaaaggacgcaaatacttccatcacaattccgatttttacattccgaaggctaccctgaaagacagcggcagctatttctgccggggactcgtcggctccaagaatgtgtcctccgaaaccgtgaatatcacgattacccaaggactggctgtgcctacaatctctagcttctttccgcctggataccaagtctccttctgtcttgtgatggtcctcctgtttgctgtggacacaggactgtacttttccgtgaaaacgaacatccgcagctccacacgcgattggaaagatcacaagtttaaatggcgcaaagatccccaggacaag

SEQ ID NO: 9157 - DNA, 1506 bp, Artificial Sequence
  Synthetic Polynucleotide
atggccttaccagtgaccgccttgctcctgccgctggccttgctgctccacgccgccaggccgcagatcgtgctgtctcagtctcctgccatcctgagtgcctctccaggcgagaaagtgaccatgacctgtagagccagcagcagcgtgtcctacatccactggttccagcagaagcctggcagcagccctaagccttggatctacgccaccagcaatctggcctctggcgtgccagtcagattttctggcagcggctctggcaccagctacagcctgacaatcagcagagtggaagccgaggatgccgccacctactactgtcagcagtggacctccaatcctcctacctttggcggaggcaccaagctggaaatcaaaggcggaggcggaagtggaggcggaggatctggcggcggaggctctcaggttcagctgcaacagcctggcgctgagcttgtgaaacctggcgcttccgtgaagatgagctgcaaggccagcggctacaccttcaccagctataacatgcactgggtcaagcagaccccaggcagaggactggaatggatcggagccatctatcccggcaacggcgacacctcctacaaccagaagttcaagggcaaagccacactgaccgccgacaagagcagcagcacagcctacatgcagctgagcagcctgaccagcgaagatagcgccgtgtactactgcgcccggtctacctattatggcggcgactggtacttcaacgtgtggggagctggcaccaccgtgacagtttctacgcgtggaatgaggactgaggatcttcccaaagctgtcgtctttctcgaaccccaatggtatcgggtgctcgaaaaagactctgtgacactgaaatgccaaggggcctactctcccgaggacaactccacacagtggtttcataatgagtccctcatcagctctcaggccagctcttatttcattgatgccgctacagtggacgactccggcgagtatcggtgtcagaccaatctgtctacactgtctgaccccgtgcagcttgaggtccacattggatggttgctcttgcaagccccacgctgggttttcaaagaggaagatccaatccatctgcggtgccacagctggaaaaacaccgctctccacaaagtcacatacctgcaaaatggcaaaggacgcaaatacttccatcacaattccgatttttacattccgaaggctaccctgaaagacagcggcagctatttctgccggggactcgtcggctccaagaatgtgtcctccgaaaccgtgaatatcacgattacccaaggactggctgtgcctacaatctctagcttctttccgcctggataccaagtctccttctgtcttgtgatggtcctcctgtttgctgtggacacaggactgtacttttccgtgaaaacgaacatccgcagctccacacgcgattggaaagatcacaagtttaaatggcgcaaagatccccaggacaag

SEQ ID NO: 9158 - DNA, 1506 bp, Artificial Sequence
  Synthetic Polynucleotide
atggccttaccagtgaccgccttgctcctgccgctggccttgctgctccacgccgccaggccggatattcagctgacccagagccacaagtttctgagcaccagcgtgggcgacagagtgtccatcacctgtaaagccagccaggacgtgtacaacgccgtggcctggtatcagcagaagcctggacagagccccaagctgctgatctacagcgccagcagcagatacacaggcgtgcccagcagattcaccggctctggatctggccccgacttcacctttaccatcagctctgtgcaggccgaggacctggccgtgtacttttgtcagcagcacttcagaacccctttcaccttcggcagcggcaccaagctggaaatcaagggcggaggcggaagtggaggcggaggatctggcggcggaggctctcaggttcagctccagcagtctggacccgagctgaagaaacctggcgagacagtgaagatcagctgcaaggccagcggctaccccttcaccaactacggcatgaactgggtcaagcaggcccctggacagggcctgaaatggatgggctggatcaataccagcaccggcgagagcaccttcgccgacgatttcaagggcagattcgacttcagcctggaaaccagcgccaacaccgcctacctccagatcaacaacctgaagtccgaggatatggctacctacttctgcgccagatgggaagtgtaccacggctacgtgccatattggggccagggcacaaccgtgacagtctcttctacgcgtggaatgaggactgaggatcttcccaaagctgtcgtctttctcgaaccccaatggtatcgggtgctcgaaaaagactctgtgacactgaaatgccaaggggcctactctcccgaggacaactccacacagtggtttcataatgagtccctcatcagctctcaggccagctcttatttcattgatgccgctacagtggacgactccggcgagtatcggtgtcagaccaatctgtctacactgtctgaccccgtgcagcttgaggtccacattggatggttgctcttgcaagccccacgctgggttttcaaagaggaagatccaatccatctgcggtgccacagctggaaaaacaccgctctccacaaagtcacatacctgcaaaatggcaaaggacgcaaatacttccatcacaattccgatttttacattccgaaggctaccctgaaagacagcggcagctatttctgccggggactcgtcggctccaagaatgtgtcctccgaaaccgtgaatatcacgattacccaaggactggctgtgcctacaatctctagcttctttccgcctggataccaagtctccttctgtcttgtgatggtcctcctgtttgctgtggacacaggactgtacttttccgtgaaaacgaacatccgcagctccacacgcgattggaaagatcacaagtttaaatggcgcaaagatccccaggacaag

SEQ ID NO: 9159 - DNA, 1503 bp, Artificial Sequence
  Synthetic Polynucleotide
atggccttaccagtgaccgccttgctcctgccgctggccttgctgctccacgccgccaggccggacatccagctgacacagagcccttctagcctgtctgccagcgtgggcgacagagtgaccatcacctgtaaagccagccaggacgtgggcacaagcgtggcatggtatcagcagaagcctggcaaggcccctaagctgctgatctactggaccagcaccagacacacaggcgtgcccagcagattttctggcagcggctctggcaccgacttcaccttcacaatatccagcctccagcctgaggacattgccacctactactgccagcagtacagcctgtaccgctctttcggccagggcaccaaggtggaaatcaaaggcggaggcggaagtggaggcggaggatctggcggcggaggctctgaagtgcagctggttgaatcaggtggcggcgttgtgcagcctggcagaagtctgagactgagctgtagcgccagcggcttcgatttcaccacctactggatgagctgggtccgacaggcccctggcaaaggactggaatggatcggcgagattcaccccgacagcagcaccatcaattacgcccctagcctgaaggacagattcaccatcagccgggacaacgccaagaacaccctgttcctccagatggactccctgaggccagaggataccggcgtgtacttttgcgccagcctgtatttcggcttcccttggtttgcctactggggccagggaacccctgtgacagttagctctacgcgtggaatgaggactgaggatcttcccaaagctgtcgtctttctcgaaccccaatggtatcgggtgctcgaaaaagactctgtgacactgaaatgccaaggggcctactctcccgaggacaactccacacagtggtttcataatgagtccctcatcagctctcaggccagctcttatttcattgatgccgctacagtggacgactccggcgagtatcggtgtcagaccaatctgtctacactgtctgaccccgtgcagcttgaggtccacattggatggttgctcttgcaagccccacgctgggttttcaaagaggaagatccaatccatctgcggtgccacagctggaaaaacaccgctctccacaaagtcacatacctgcaaaatggcaaaggacgcaaatacttccatcacaattccgatttttacattccgaaggctaccctgaaagacagcggcagctatttctgccggggactcgtcggctccaagaatgtgtcctccgaaaccgtgaatatcacgattacccaaggactggctgtgcctacaatctctagcttctttccgcctggataccaagtctccttctgtcttgtgatggtcctcctgtttgctgtggacacaggactgtacttttccgtgaaaacgaacatccgcagctccacacgcgattggaaagatcacaagtttaaatggcgcaaagatccccaggacaag

SEQ ID NO: 9160 - DNA, 1515 bp, Artificial Sequence
  Synthetic Polynucleotide
atggccttaccagtgaccgccttgctcctgccgctggccttgctgctccacgccgccaggccggacatccagctgacacagagcccttctagcctgtctgccagcgtgggcgacagagtgaccatcacctgtagcacaagcagcagcgtgtcctacatgcactggtatcagcagaagcccggcaaggcccctaagctgctgatctacagcaccagcaatctggcctctggcgtgcccagcagattttctggctctggcagcggcaccgacttcaccttcacaatatccagcctccagcctgaggacattgccacctactactgccaccagtggtctagctaccccacattcggccagggcaccaaggtggaaatcaaaggcggaggcggaagtggaggcggaggatctggcggcggaggctctggagtgcattctcaggttcagctgcaagagtctggccctggacttgtgcggcctagccaaacactgagcctgacctgtaccgtgtccggcttcacaatcagctccggctacagctggcactgggtccgacaaccacctggcagaggactggaatggatcggctacatccagtacagcggcatcaccaactacaaccccagcctgaagtcccgcgtgaccatgctggtggacacctccaagaaccagttcagcctgagactgagcagcgtgacagccgccgatacagccgtgtactactgcgccagagaggactacgactaccactggtacttcgacgtgtggggccagggaaccaccgtgacagtttcttctacgcgtggaatgaggactgaggatcttcccaaagctgtcgtctttctcgaaccccaatggtatcgggtgctcgaaaaagactctgtgacactgaaatgccaaggggcctactctcccgaggacaactccacacagtggtttcataatgagtccctcatcagctctcaggccagctcttatttcattgatgccgctacagtggacgactccggcgagtatcggtgtcagaccaatctgtctacactgtctgaccccgtgcagcttgaggtccacattggatggttgctcttgcaagccccacgctgggttttcaaagaggaagatccaatccatctgcggtgccacagctggaaaaacaccgctctccacaaagtcacatacctgcaaaatggcaaaggacgcaaatacttccatcacaattccgatttttacattccgaaggctaccctgaaagacagcggcagctatttctgccggggactcgtcggctccaagaatgtgtcctccgaaaccgtgaatatcacgattacccaaggactggctgtgcctacaatctctagcttctttccgcctggataccaagtctccttctgtcttgtgatggtcctcctgtttgctgtggacacaggactgtacttttccgtgaaaacgaacatccgcagctccacacgcgattggaaagatcacaagtttaaatggcgcaaagatccccaggacaag

SEQ ID NO: 9161 - DNA, 1515 bp, Artificial Sequence
  Synthetic Polynucleotide
atggccttaccagtgaccgccttgctcctgccgctggccttgctgctccacgccgccaggccggacatccagatgacacagagccctagcagcctgtctgccagcgtgggagacagagtgaccatcacctgtagagccagccaggacgtgaacacagccgtggcttggtatcagcagaagcctggcaaggcccctaagctgctgatctacagcgccagctttctgtacagcggcgtgcccagcagattcagcggaagcagaagcggcaccgacttcaccctgacaatatccagcctccagcctgaggacttcgccacctactactgccagcaggcttacaccacacctccaacattcggccagggcaccaaggtggaaatcaagagaacaggcggaggcggaagtggaggcggaggatctggcggcggaggctctgaagtgcagctggttgaatcaggtggcggcctggttcaacctggcggatctctgagactgagctgtgccgccagcggcttcaacatcaaggacacctacatccactgggtccgacaggcccctggcaaaggacttgaatgggtcgccagaatctaccccaccaacggctacaccagatacgccgactctgtgaagggcagattcaccatcagcgccgacaccagcaagaacaccgcctacctccagatgaactccctgagagccgaggacaccgccgtgtactactgtagcagatggggcggagccggagcctacgctatggatgtttggggccagggaaccctggtcaccgtgtcatctacgcgtggaatgaggactgaggatcttcccaaagctgtcgtctttctcgaaccccaatggtatcgggtgctcgaaaaagactctgtgacactgaaatgccaaggggcctactctcccgaggacaactccacacagtggtttcataatgagtccctcatcagctctcaggccagctcttatttcattgatgccgctacagtggacgactccggcgagtatcggtgtcagaccaatctgtctacactgtctgaccccgtgcagcttgaggtccacattggatggttgctcttgcaagccccacgctgggttttcaaagaggaagatccaatccatctgcggtgccacagctggaaaaacaccgctctccacaaagtcacatacctgcaaaatggcaaaggacgcaaatacttccatcacaattccgatttttacattccgaaggctaccctgaaagacagcggcagctatttctgccggggactcgtcggctccaagaatgtgtcctccgaaaccgtgaatatcacgattacccaaggactggctgtgcctacaatctctagcttctttccgcctggataccaagtctccttctgtcttgtgatggtcctcctgtttgctgtggacacaggactgtacttttccgtgaaaacgaacatccgcagctccacacgcgattggaaagatcacaagtttaaatggcgcaaagatccccaggacaag

SEQ ID NO: 9162 - DNA, 1524 bp, Artificial Sequence
  Synthetic Polynucleotide
atggccttaccagtgaccgccttgctcctgccgctggccttgctgctccacgccgccaggccggagatcgtgctgacacagagccctggcacactgtcactgtctccaggcgaaagagccacactgagctgtagagccagccagagcgtgtccagcgattacctggcttggtatcagcagaagcccggacaggctcccagactgctgatctacggtgcctctagcagagccacaggcatccccgatagattttctggcagcggctccggcaccgacttcaccctgacaattagcagactgcccgaggacttcgccgtgtactactgccagcagtacgtgtcctactggacctttggcggaggcaccaaggtggaaatcaaaagaacagtggctgccggcggaggcggaagtggaggcggaggatctggcggcggaggctctcaggtgcagctggttgaatctggtggcggagttgtgcagcctggcagaagcctgagactgtcttgtgccgccagcggcttcacctttagcagctatgccatgcactgggtccgacaggcccctggcaaaggacttgaatgggtcgccgtgatctcctacgacggcagcaacaagtattacgccgacagcgtgaagggcagattcaccatcagccgggacaacagcaagaacaccctgtacctccagatgaacagcctgagagccgaggacaccgccgtgtactactgtgccaaagaggccccttactacgccaaggactacatggacgtgtggggcaagggcaccaccgtgacagtttcttctacgcgtggaatgaggactgaggatcttcccaaagctgtcgtctttctcgaaccccaatggtatcgggtgctcgaaaaagactctgtgacactgaaatgccaaggggcctactctcccgaggacaactccacacagtggtttcataatgagtccctcatcagctctcaggccagctcttatttcattgatgccgctacagtggacgactccggcgagtatcggtgtcagaccaatctgtctacactgtctgaccccgtgcagcttgaggtccacattggatggttgctcttgcaagccccacgctgggttttcaaagaggaagatccaatccatctgcggtgccacagctggaaaaacaccgctctccacaaagtcacatacctgcaaaatggcaaaggacgcaaatacttccatcacaattccgatttttacattccgaaggctaccctgaaagacagcggcagctatttctgccggggactcgtcggctccaagaatgtgtcctccgaaaccgtgaatatcacgattacccaaggactggctgtgcctacaatctctagcttctttccgcctggataccaagtctccttctgtcttgtgatggtcctcctgtttgctgtggacacaggactgtacttttccgtgaaaacgaacatccgcagctccacacgcgattggaaagatcacaagtttaaatggcgcaaagatccccaggacaag

SEQ ID NO: 9163 - DNA, 1521 bp, Artificial Sequence
  Synthetic Polynucleotide
atggccttaccagtgaccgccttgctcctgccgctggccttgctgctccacgccgccaggccgagctacgagctgatccagcctccttctgccgctgtgacactgggcaataccgtgtctctgacctgtgtgggagatgagctgcccaagagatacgcctactggtatcagcagaagcccgaccagagcatcgtgcgcgtgatctacgaagatagcgtgcggcctcctggcatcagcgatagattttctggcagcagcagcggcaccaccgccacactgacaattagagatgcccagaacgaggacgaggccgactactactgtcagagcacctacggcgacgacaagctgtacatctttggcggaggcaccaagctgacagtgcttggaggcggaggcggaagtggaggcggaggatctggcggcggaggctctgaagttcagctggttgaaacaggtggcggcctggtgcagcctggcaaatctctggaactgacctgcgccaccagcggcttcacctttaataccgcctggatgcactgggtccgacagagccccgataagcggctggaatggatcgccagaatcaaggacaccagcaacaactacgccaccgactacgtggaatccatgaagggcagattcaccatcagccgggacgacagcaagggctccgtgaacctccagatgaacagcctgaaagaagaggacaccgccacctactactgcaccaccgacttctacgacggcacctactattggaactactggggccagggcgtgatggtcacagtgtcatctacgcgtggaatgaggactgaggatcttcccaaagctgtcgtctttctcgaaccccaatggtatcgggtgctcgaaaaagactctgtgacactgaaatgccaaggggcctactctcccgaggacaactccacacagtggtttcataatgagtccctcatcagctctcaggccagctcttatttcattgatgccgctacagtggacgactccggcgagtatcggtgtcagaccaatctgtctacactgtctgaccccgtgcagcttgaggtccacattggatggttgctcttgcaagccccacgctgggttttcaaagaggaagatccaatccatctgcggtgccacagctggaaaaacaccgctctccacaaagtcacatacctgcaaaatggcaaaggacgcaaatacttccatcacaattccgatttttacattccgaaggctaccctgaaagacagcggcagctatttctgccggggactcgtcggctccaagaatgtgtcctccgaaaccgtgaatatcacgattacccaaggactggctgtgcctacaatctctagcttctttccgcctggataccaagtctccttctgtcttgtgatggtcctcctgtttgctgtggacacaggactgtacttttccgtgaaaacgaacatccgcagctccacacgcgattggaaagatcacaagtttaaatggcgcaaagatccccaggacaag

SEQ ID NO: 9164 - DNA, 1533 bp, Artificial Sequence
  Synthetic Polynucleotide
atggccttaccagtgaccgccttgctcctgccgctggccttgctgctccacgccgccaggccgagcgtgatcgagctgacacagagccccaagttcatgagcaccagcgtgggcgacagagtgaacgtgacatacaaggccagccagaacgtgggcaccaacgtggcatggttccagcagaagcctggacagagccctaaggtgctgatctacagcgccagctacagatacagcggcgtgcccgatagattcacaggctctggcagcggcaccgacttcaccctgacaatcagcaacgtgcagagcgaggacctggccgagtatttctgccagcagtaccacacataccctctgacctttggcggaggcaccaagctggaaatcaagagaggcggaggcggaagtggaggcggaggatctggcggcggaggctctagaatggctcaggttcagctgcaacagagcggagccgaacttgctagacctggcgcttccgtgaagatgagctgtaaagccagcggctacaccttcaccacctacaccatccactgggtccgaagaaggccaggccacgaccttgagtggatcggctacatcaaccccagcagcggctgctccgactacaaccagaacttcaagggcaagaccacactgaccgccgacaagagcagcaacaccgcctacatgcagctcaacagcctgaccagcgaggacagcgccgtgtactattgtgccagaagggccgactacggcaactacgagtacacttggtttgcctactggggccagggcaccaccgtgacagtttcttctacgcgtggaatgaggactgaggatcttcccaaagctgtcgtctttctcgaaccccaatggtatcgggtgctcgaaaaagactctgtgacactgaaatgccaaggggcctactctcccgaggacaactccacacagtggtttcataatgagtccctcatcagctctcaggccagctcttatttcattgatgccgctacagtggacgactccggcgagtatcggtgtcagaccaatctgtctacactgtctgaccccgtgcagcttgaggtccacattggatggttgctcttgcaagccccacgctgggttttcaaagaggaagatccaatccatctgcggtgccacagctggaaaaacaccgctctccacaaagtcacatacctgcaaaatggcaaaggacgcaaatacttccatcacaattccgatttttacattccgaaggctaccctgaaagacagcggcagctatttctgccggggactcgtcggctccaagaatgtgtcctccgaaaccgtgaatatcacgattacccaaggactggctgtgcctacaatctctagcttctttccgcctggataccaagtctccttctgtcttgtgatggtcctcctgtttgctgtggacacaggactgtacttttccgtgaaaacgaacatccgcagctccacacgcgattggaaagatcacaagtttaaatggcgcaaagatccccaggacaag

SEQ ID NO: 9165 - DNA, 1506 bp, Artificial Sequence
  Synthetic Polynucleotide
atggccttaccagtgaccgccttgctcctgccgctggccttgctgctccacgccgccaggccggacatccagatgacacagagccctagcagcgtgtccgcctctgtgggagacagagtgaccatcacctgtagagccagccagagcgtgtccagctacctgaactggtatcagcagaagcccggcaaggcccctaagctgctgatctatgctgccagctctctgcagtctggcgtgcccagcagattttctggcagcggctctggcaccgacttcaccctgaccatatctagcctgcagcctgaggacttcgccacctactactgccagcagagctacagcaccccttggacctttggacagggcaccaagctggaaatcaagagaggcggaggcggaagtggaggcggaggatctggcggcggaggctctgaagtgcagctggttgaatcaggtggcggcctggttcagcctggcagaagtctgagactgagctgtgccgccagcggcttcaccttcgacgattacggaatgcactgggtccgacaggcccctggcaaaggacttgaatgggtgtccggcatcagctggaacagcggcagcatcggctatgccgatagcgccaagggcagattcaccatcagccgggacaacagcaagaacaccctgtacctgcagatgaacagcctgagagccgaggacaccgccgtgtactactgtgccaagaggggcaacagcaacagcttcgactattggggccagggcaccctggtcacagtctcttctacgcgtggaatgaggactgaggatcttcccaaagctgtcgtctttctcgaaccccaatggtatcgggtgctcgaaaaagactctgtgacactgaaatgccaaggggcctactctcccgaggacaactccacacagtggtttcataatgagtccctcatcagctctcaggccagctcttatttcattgatgccgctacagtggacgactccggcgagtatcggtgtcagaccaatctgtctacactgtctgaccccgtgcagcttgaggtccacattggatggttgctcttgcaagccccacgctgggttttcaaagaggaagatccaatccatctgcggtgccacagctggaaaaacaccgctctccacaaagtcacatacctgcaaaatggcaaaggacgcaaatacttccatcacaattccgatttttacattccgaaggctaccctgaaagacagcggcagctatttctgccggggactcgtcggctccaagaatgtgtcctccgaaaccgtgaatatcacgattacccaaggactggctgtgcctacaatctctagcttctttccgcctggataccaagtctccttctgtcttgtgatggtcctcctgtttgctgtggacacaggactgtacttttccgtgaaaacgaacatccgcagctccacacgcgattggaaagatcacaagtttaaatggcgcaaagatccccaggacaag

SEQ ID NO: 9166 - DNA, 1527 bp, Artificial Sequence
  Synthetic Polynucleotide
atggccttaccagtgaccgccttgctcctgccgctggccttgctgctccacgccgccaggccgcagtctgctctgacccagcctagatccgtgtctggctctcctggacagagcgtgaccatcagctgtaccggcacctcttctgacgtgggcagctacaactacgtgtcctggtatcagcagagccccggcaaggcccctaagctgatgatctacgacgtgtccaacagacccagcggcgtgtccaatagattctccggcagcaagagcggcaacaccgccagcctgacaatctctggactccagtctgaggacgaggccgactactactgtaccagctacggcagctacgacatccccgtgatttttggcggaggcaccaaggtggaaatcaaaggcggaggcggaagtggaggcggaggatctggcggcggaggctctcagatgcagctggtgcagtctggggccgaagtgaagaaacctggcagcagcgtgaaggtgtcctgcaaagcaagcggcggcacctttagctcctacgccatctcttgggtccgacaggctccaggacaaggactggaatggatgggcggcatcatccccatcttcggcacagccaattacgcccagaaattccagggcagagtgacaatcaccgccgacaagagcaccagcaccgcctacatggaactgagcagcctgagaagcgacgacaccgccgtgtactactgcgccagagatgaactgtgggccaccaactactactacatggacgtgtggggcaagggcaccctggtcacagtttcttctacgcgtggaatgaggactgaggatcttcccaaagctgtcgtctttctcgaaccccaatggtatcgggtgctcgaaaaagactctgtgacactgaaatgccaaggggcctactctcccgaggacaactccacacagtggtttcataatgagtccctcatcagctctcaggccagctcttatttcattgatgccgctacagtggacgactccggcgagtatcggtgtcagaccaatctgtctacactgtctgaccccgtgcagcttgaggtccacattggatggttgctcttgcaagccccacgctgggttttcaaagaggaagatccaatccatctgcggtgccacagctggaaaaacaccgctctccacaaagtcacatacctgcaaaatggcaaaggacgcaaatacttccatcacaattccgatttttacattccgaaggctaccctgaaagacagcggcagctatttctgccggggactcgtcggctccaagaatgtgtcctccgaaaccgtgaatatcacgattacccaaggactggctgtgcctacaatctctagcttctttccgcctggataccaagtctccttctgtcttgtgatggtcctcctgtttgctgtggacacaggactgtacttttccgtgaaaacgaacatccgcagctccacacgcgattggaaagatcacaagtttaaatggcgcaaagatccccaggacaag

SEQ ID NO: 9167 - DNA, 1506 bp, Artificial Sequence
  Synthetic Polynucleotide
atggccttaccagtgaccgccttgctcctgccgctggccttgctgctccacgccgccaggccggacgtggtcatgacacagagcccttctagcctgtctgccagcgtgggcgacagagtgaccatcacctgtaaagccagccagagcgtgtccagctacctgaactggtatcagcagaagcccggcaaggcccctaagctgctgatctatgctgccagcagcctggaaacaggcgtgcccagcagattttctggcagcggctctggcaccgacttcaccctgacaatatccagcctccagcctgaggacttcgccacctactactgtcagcagagctacagcaccccttggacctttggccagggcaccaaggtggaaatcaagagaggcggaggcggaagtggaggcggaggatctggcggcggaggctctgaagttcagctggttgaatctggcggcggactcgttagacctggcggatctctgagactgagctgtgccgccagcggcttcaccttcgatgattacggcatgagctgggtccgacaggcccctggaaaaggactggaatgggtgtccggcatcagctggaatagcggctctatcggctacgccgacagcgtgaagggcagattcaccatcagccgggacaacgccaagaacagcctgtacctccagatgaactccctgagagccgaggacacagccctgtactactgtgccaagcggggcaacagcaacagcttcgattattggggccagggaaccaccgtgaccgtgtcatctacgcgtggaatgaggactgaggatcttcccaaagctgtcgtctttctcgaaccccaatggtatcgggtgctcgaaaaagactctgtgacactgaaatgccaaggggcctactctcccgaggacaactccacacagtggtttcataatgagtccctcatcagctctcaggccagctcttatttcattgatgccgctacagtggacgactccggcgagtatcggtgtcagaccaatctgtctacactgtctgaccccgtgcagcttgaggtccacattggatggttgctcttgcaagccccacgctgggttttcaaagaggaagatccaatccatctgcggtgccacagctggaaaaacaccgctctccacaaagtcacatacctgcaaaatggcaaaggacgcaaatacttccatcacaattccgatttttacattccgaaggctaccctgaaagacagcggcagctatttctgccggggactcgtcggctccaagaatgtgtcctccgaaaccgtgaatatcacgattacccaaggactggctgtgcctacaatctctagcttctttccgcctggataccaagtctccttctgtcttgtgatggtcctcctgtttgctgtggacacaggactgtacttttccgtgaaaacgaacatccgcagctccacacgcgattggaaagatcacaagtttaaatggcgcaaagatccccaggacaag

SEQ ID NO: 9168 - DNA, 1506 bp, Artificial Sequence
  Synthetic Polynucleotide
atggccttaccagtgaccgccttgctcctgccgctggccttgctgctccacgccgccaggccggacatccagatgacacagagccctagcagcgtgtccgcctctgtgggagacagagtgaccatcacctgtagagccagccagagcatcagcagctacctgaactggtatcagcagaagcccggcaaggcccctaaactgctgatctatgccgccagctctctccagagcggagtgcctagcagattttctggcagcggctccggcaccgatttcaccctgacaatatccagcctccagcctgaggacttcgccacctactactgccagcagagctacagcaccccttggacctttggacagggcaccaaggtggaaatcaagagaggcggaggcggaagtggaggcggaggatctggcggcggaggctctgaagtgcagctggttgaatcaggtggcggcctggttcagcctggcagaagtctgagactgagctgtgccgcctccggcttcaccttcgatgattacgccatgcactgggtccgacaggcccctggaaaaggactggaatgggtgtccggcatcagctggaatagcggctctatcggctacgccgattccgccaagggcagattcaccatcagccgggacaacagcaagaacaccctgtacctccagatgaactccctgagagccgaggacaccgccgtgtactactgtgccaagaggggcaacagcaacagcttcgactattggggccagggcaccctggtcacagtctcttctacgcgtggaatgaggactgaggatcttcccaaagctgtcgtctttctcgaaccccaatggtatcgggtgctcgaaaaagactctgtgacactgaaatgccaaggggcctactctcccgaggacaactccacacagtggtttcataatgagtccctcatcagctctcaggccagctcttatttcattgatgccgctacagtggacgactccggcgagtatcggtgtcagaccaatctgtctacactgtctgaccccgtgcagcttgaggtccacattggatggttgctcttgcaagccccacgctgggttttcaaagaggaagatccaatccatctgcggtgccacagctggaaaaacaccgctctccacaaagtcacatacctgcaaaatggcaaaggacgcaaatacttccatcacaattccgatttttacattccgaaggctaccctgaaagacagcggcagctatttctgccggggactcgtcggctccaagaatgtgtcctccgaaaccgtgaatatcacgattacccaaggactggctgtgcctacaatctctagcttctttccgcctggataccaagtctccttctgtcttgtgatggtcctcctgtttgctgtggacacaggactgtacttttccgtgaaaacgaacatccgcagctccacacgcgattggaaagatcacaagtttaaatggcgcaaagatccccaggacaag

SEQ ID NO: 9169 - DNA, 1506 bp, Artificial Sequence
  Synthetic Polynucleotide
atggccttaccagtgaccgccttgctcctgccgctggccttgctgctccacgccgccaggccggacacagtgctgacacagtctccagctctggctgtgtctcctggcgagagagtgaccatctcttgcaaggccagcgagagcgtgtccaccagaatgcactggtacagacagaagcccggccagcagccaaagctgctgatctacaagaccagcaacctggcctctggcgtgccagccagattttctggctctggcagcggcaccgacttcaccctgaccattgatcccgtggaagccgacgacaccgccacctacttttgtcagcagtcctggaacggccctctgacatttggaagcggcaccaagctggaaatcaagagaggcggaggcggaagtggaggcggaggatctggcggcggaggctctcaggtgcagctgaaagagtctggccctggactggtgcagcctagccaaacactgagcctgacctgtaccgtgtctggcctgtctctgaccagcaatggcgtgtcctggatcagacagcctcctggcaaaggactggaatggctgggcgtgatctggtccaatggcggcacagactacaacagcgccatcaagagccggctgagcttcagcagagacaccagcaagagccaggtgttcctgaagatgaacagcctccagaccgaggataccgccatgtacttttgcgccagacctcggtacaactccggctacttcttcgactattggggccagggcgtgatggtcaccgttagctctacgcgtggaatgaggactgaggatcttcccaaagctgtcgtctttctcgaaccccaatggtatcgggtgctcgaaaaagactctgtgacactgaaatgccaaggggcctactctcccgaggacaactccacacagtggtttcataatgagtccctcatcagctctcaggccagctcttatttcattgatgccgctacagtggacgactccggcgagtatcggtgtcagaccaatctgtctacactgtctgaccccgtgcagcttgaggtccacattggatggttgctcttgcaagccccacgctgggttttcaaagaggaagatccaatccatctgcggtgccacagctggaaaaacaccgctctccacaaagtcacatacctgcaaaatggcaaaggacgcaaatacttccatcacaattccgatttttacattccgaaggctaccctgaaagacagcggcagctatttctgccggggactcgtcggctccaagaatgtgtcctccgaaaccgtgaatatcacgattacccaaggactggctgtgcctacaatctctagcttctttccgcctggataccaagtctccttctgtcttgtgatggtcctcctgtttgctgtggacacaggactgtacttttccgtgaaaacgaacatccgcagctccacacgcgattggaaagatcacaagtttaaatggcgcaaagatccccaggacaag

SEQ ID NO: 9170 - DNA, 1542 bp, Artificial Sequence
  Synthetic Polynucleotide
atggccttaccagtgaccgccttgctcctgccgctggccttgctgctccacgccgccaggccggacctggtcatgacacagagcccttttagcctggccgtgtccgagggcgagatggtcacaatcaagtgcaagagcagccagagcctgctgagcagcagacaccagaagaactttctggcctggtacagacagaagcccggacagtctcccaagctgctgatctaccacgccagcacaagacagagcggcgtgcccgatagattcatcggctctggcagcggcaccgacttcaccctgacaatctctgatgtgcaggccgaggacctggccgactactattgtctccagcactacacaagcccctacacctttggagccggcaccaagctggaactgaaaagaggcggaggcggaagtggaggcggaggatctggcggcggaggctctcaagtgcagctgaaagagtctggccccggactggttcagcctagccaaacactgagcctgacctgtaccgtgtccggctttagcctgaccagctaccacgtgcactgggtccgacaacctccaggcaaaggactggaatggatgggcgtgatgtggagcgacggcgacaccctgtataacagcgccctgaagtcccggctgagcatcagcagagataccagcaagagccaggtgctgctccagatggatagcctccagagcgaggataccgccacctactactgtgccagactccaggtgttcggctaccccggcatcagagactacgtgatggatgcctggggacagggcgcttctgtgacagtctcttctacgcgtggaatgaggactgaggatcttcccaaagctgtcgtctttctcgaaccccaatggtatcgggtgctcgaaaaagactctgtgacactgaaatgccaaggggcctactctcccgaggacaactccacacagtggtttcataatgagtccctcatcagctctcaggccagctcttatttcattgatgccgctacagtggacgactccggcgagtatcggtgtcagaccaatctgtctacactgtctgaccccgtgcagcttgaggtccacattggatggttgctcttgcaagccccacgctgggttttcaaagaggaagatccaatccatctgcggtgccacagctggaaaaacaccgctctccacaaagtcacatacctgcaaaatggcaaaggacgcaaatacttccatcacaattccgatttttacattccgaaggctaccctgaaagacagcggcagctatttctgccggggactcgtcggctccaagaatgtgtcctccgaaaccgtgaatatcacgattacccaaggactggctgtgcctacaatctctagcttctttccgcctggataccaagtctccttctgtcttgtgatggtcctcctgtttgctgtggacacaggactgtacttttccgtgaaaacgaacatccgcagctccacacgcgattggaaagatcacaagtttaaatggcgcaaagatccccaggacaag

SEQ ID NO: 9171 - DNA, 1545 bp, Artificial Sequence
  Synthetic Polynucleotide
atggccttaccagtgaccgccttgctcctgccgctggccttgctgctccacgccgccaggccggacatccagctgactcagagccctagctttctgagcgccagcgtgggcgacagagtgaccattacatgtagagccagccaggacatcagcagctacctggcctggtatcagcagaagcctggcaacgcccctaaactgctgatctacgccgccagcctgctgcaatctggcgtgccaagcagattcagcgcctttggcagcggcaccgagttcaccctgacaatatctagcctccagccagaggacttcgccacctactactgccagcacctgaagtcttaccctctgttcaccttcggacccggcaccaaggtggacatcaaaagaggcggaggcggaagtggaggcggaggatctggcggcggaggctctgaagttcagctggttgagtctggcggcagagtcgttagacctggcggaagcctgagactgtcttgtgccgccagcggcttcacctttgacgactacggcatgagctgggtccgacagcctcctggaaagggcctcgaatttgtgtccggcctgaactggaacggcgacatcaccgcctttaccgacagcgtgaagggcagattcaccatcagccgggacaacgtgaagtccagcctgtacctccagatgaacagcctgagagccgacgacaccgccttctactactgtgccagagtgcggacctggggcgattacacaacaggcgaggaaatcatcaacagctggtacttcgacctgtggggcagaggcacactggtcacagtctcttctacgcgtggaatgaggactgaggatcttcccaaagctgtcgtctttctcgaaccccaatggtatcgggtgctcgaaaaagactctgtgacactgaaatgccaaggggcctactctcccgaggacaactccacacagtggtttcataatgagtccctcatcagctctcaggccagctcttatttcattgatgccgctacagtggacgactccggcgagtatcggtgtcagaccaatctgtctacactgtctgaccccgtgcagcttgaggtccacattggatggttgctcttgcaagccccacgctgggttttcaaagaggaagatccaatccatctgcggtgccacagctggaaaaacaccgctctccacaaagtcacatacctgcaaaatggcaaaggacgcaaatacttccatcacaattccgatttttacattccgaaggctaccctgaaagacagcggcagctatttctgccggggactcgtcggctccaagaatgtgtcctccgaaaccgtgaatatcacgattacccaaggactggctgtgcctacaatctctagcttctttccgcctggataccaagtctccttctgtcttgtgatggtcctcctgtttgctgtggacacaggactgtacttttccgtgaaaacgaacatccgcagctccacacgcgattggaaagatcacaagtttaaatggcgcaaagatccccaggacaag

SEQ ID NO: 9172 - DNA, 1509 bp, Artificial Sequence
  Synthetic Polynucleotide
atggccttaccagtgaccgccttgctcctgccgctggccttgctgctccacgccgccaggccggaactccagatgacacagagccctagcagcctgtctgccagcgtgggagacagagtggctatcacctgtagagccagccagagcatcagcagccacctgaactggtatcagcagaagcctggcaaggcccctaagctgctgatctatgccgccagctctctccagagcggagtgcctagcagattttctggcagcggctccggcaccgatttcaccctgacaatatccagcctccagcctgaggacttcgccacctactactgccagcagagctacagcaccccttacacattcggccagggcaccaagctggaaatcaaaggcggaggcggaagtggaggcggaggatctggcggcggaggctctgaagtgcagctggttgaatcaggtggcggcctggttcaacctggcggatctctgagactgagctgtgccgcctccggcttcacctttagcagctactggatgagctgggtccgacaggcccctggcaaaggacttgagtgggtcgccaacatcaagcaggacggcagcgagaagtattacgtggacagcgtgaagggcagattcaccatcagccgggacaacgccaagaacagcctgtacctgcggatgaactccctgagagccgaggataccgccgtgtactattgtgccagagcctggggctacagctcctactacttcgactattggggccagggaaccctggtcaccgtttctccaacgcgtggaatgaggactgaggatcttcccaaagctgtcgtctttctcgaaccccaatggtatcgggtgctcgaaaaagactctgtgacactgaaatgccaaggggcctactctcccgaggacaactccacacagtggtttcataatgagtccctcatcagctctcaggccagctcttatttcattgatgccgctacagtggacgactccggcgagtatcggtgtcagaccaatctgtctacactgtctgaccccgtgcagcttgaggtccacattggatggttgctcttgcaagccccacgctgggttttcaaagaggaagatccaatccatctgcggtgccacagctggaaaaacaccgctctccacaaagtcacatacctgcaaaatggcaaaggacgcaaatacttccatcacaattccgatttttacattccgaaggctaccctgaaagacagcggcagctatttctgccggggactcgtcggctccaagaatgtgtcctccgaaaccgtgaatatcacgattacccaaggactggctgtgcctacaatctctagcttctttccgcctggataccaagtctccttctgtcttgtgatggtcctcctgtttgctgtggacacaggactgtacttttccgtgaaaacgaacatccgcagctccacacgcgattggaaagatcacaagtttaaatggcgcaaagatccccaggacaag

SEQ ID NO: 9173 - DNA, 1497 bp, Artificial Sequence
  Synthetic Polynucleotide
atggccttaccagtgaccgccttgctcctgccgctggccttgctgctccacgccgccaggccggacatcgtgatgacccagagccacaagttcatgagcaccagcgtgggcgacagagtgtccatcatctgcaaggccagccaggatgtgggcacagccgtggattggtatcagcagaagcctggacagagccccaagctgctgatctactgggccagcacaagacacaccggcgtgcccgatagattcacaggctctggcagcggcaccgatttcaccctggccatcacaaacgtgcagagcgaggacctggccgactacttctgccagcagtacaacagctaccctctgacctttggagccggcaccaagctggaaatcaagagaggcggaggcggaagtggaggcggaggatctggcggcggaggctctgaagttcagctgcaacagtctggccccgagctggttaagcctggaacaagcgtgcggatctcctgcaagaccagcggctacaccttcaccgagtacaccatccactgggtcaagcagagccacggcaagagcctggaatggatcggcaacatcaaccccaacaacggcggcaccacctacaaccagaagttcgaggacaaggccacactgaccgtggacaagagcagcagcaccgcctacatggaactgagaagcctgaccagcgaggacagcgccgtgtactattgtgccgccggatggaacttcgactactggggccagggaacaaccctgaccgttagctctacgcgtggaatgaggactgaggatcttcccaaagctgtcgtctttctcgaaccccaatggtatcgggtgctcgaaaaagactctgtgacactgaaatgccaaggggcctactctcccgaggacaactccacacagtggtttcataatgagtccctcatcagctctcaggccagctcttatttcattgatgccgctacagtggacgactccggcgagtatcggtgtcagaccaatctgtctacactgtctgaccccgtgcagcttgaggtccacattggatggttgctcttgcaagccccacgctgggttttcaaagaggaagatccaatccatctgcggtgccacagctggaaaaacaccgctctccacaaagtcacatacctgcaaaatggcaaaggacgcaaatacttccatcacaattccgatttttacattccgaaggctaccctgaaagacagcggcagctatttctgccggggactcgtcggctccaagaatgtgtcctccgaaaccgtgaatatcacgattacccaaggactggctgtgcctacaatctctagcttctttccgcctggataccaagtctccttctgtcttgtgatggtcctcctgtttgctgtggacacaggactgtacttttccgtgaaaacgaacatccgcagctccacacgcgattggaaagatcacaagtttaaatggcgcaaagatccccaggacaag

SEQ ID NO: 9174 - DNA, 1497 bp, Artificial Sequence
  Synthetic Polynucleotide
atggccttaccagtgaccgccttgctcctgccgctggccttgctgctccacgccgccaggccggacatccagatgacacagagccctagcagcctgtctgccagcgtgggagacagagtgaccatcacatgcaaggccagccaggatgtgggcacagccgtggattggtatcagcagaagcctggcaaggcccctaagctgctgatctactgggccagcacaagacacacaggcgtgcccagcagattttctggcagcggctctggcaccgacttcaccctgacaatatccagcctccagcctgaggacttcgccacctactactgccagcagtacaacagctaccctctgaccttcggccagggcaccaaggtggaaatcaaaagaggcggaggcggaagtggaggcggaggatctggcggcggaggctctgaagtgcagctggttgaatcaggtggcggcctggttcaacctggcggatctctgagactgagctgtgccgccagcggctacacctttaccgagtacacaatccactgggtccgacaggcccctggcaaaggacttgagtgggtcgccaacatcaaccccaacaatggcggcaccacctacaaccagaagttcgaggacagattcaccatcagccgggacaacagcaagaacaccctgtacctccagatgaactccctgagagccgaggacaccgccgtgtactattgtgccagaggctggaacttcgactactggggccagggaacactggtcaccgttagctctacgcgtggaatgaggactgaggatcttcccaaagctgtcgtctttctcgaaccccaatggtatcgggtgctcgaaaaagactctgtgacactgaaatgccaaggggcctactctcccgaggacaactccacacagtggtttcataatgagtccctcatcagctctcaggccagctcttatttcattgatgccgctacagtggacgactccggcgagtatcggtgtcagaccaatctgtctacactgtctgaccccgtgcagcttgaggtccacattggatggttgctcttgcaagccccacgctgggttttcaaagaggaagatccaatccatctgcggtgccacagctggaaaaacaccgctctccacaaagtcacatacctgcaaaatggcaaaggacgcaaatacttccatcacaattccgatttttacattccgaaggctaccctgaaagacagcggcagctatttctgccggggactcgtcggctccaagaatgtgtcctccgaaaccgtgaatatcacgattacccaaggactggctgtgcctacaatctctagcttctttccgcctggataccaagtctccttctgtcttgtgatggtcctcctgtttgctgtggacacaggactgtacttttccgtgaaaacgaacatccgcagctccacacgcgattggaaagatcacaagtttaaatggcgcaaagatccccaggacaag

SEQ ID NO: 9175 - DNA, 1503 bp, Artificial Sequence
  Synthetic Polynucleotide
atggccttaccagtgaccgccttgctcctgccgctggccttgctgctccacgccgccaggccggacatccagatgacacagagccctagcagcctgtctgccagcgtgggagacagagtgaccatcacatgcaaggccagccaggatgtgggcacagccgtggattggtatcagcagaagcctggcaaggcccctaagctgctgatctcttgggccagcacaagacacacaggcgtgcccagcagattttctggcagcggctctggcaccgacttcaccctgacaatatccagcctccagcctgaggacttcgccacctacttttgccagcagtacaacagctaccctctgaccttcggccagggcaccaaggtggaaatcaagagaacagttggcggaggcggaagtggaggcggaggatctggcggcggaggctctcaagttcagctggttcagagcggagccgaagtgaagaaacctggcgagagcgtgaaggtgtcctgcaaagccagcggctacacctttaccgagtacaccatccactgggtccgacaggctccaggacaaggactggaatggatgggcaacatcaaccccaacaacggcggcaccacctacaaccagaaattcgaggatcgcgtgacaatcaccgccgacaagagcaccagcaccgcctacatggaactgagcagcctgagaagcgaggacaccgccgtgtactattgtgccagaggctggaacttcgactactggggccagggaaccaccgtgacagtctcttctacgcgtggaatgaggactgaggatcttcccaaagctgtcgtctttctcgaaccccaatggtatcgggtgctcgaaaaagactctgtgacactgaaatgccaaggggcctactctcccgaggacaactccacacagtggtttcataatgagtccctcatcagctctcaggccagctcttatttcattgatgccgctacagtggacgactccggcgagtatcggtgtcagaccaatctgtctacactgtctgaccccgtgcagcttgaggtccacattggatggttgctcttgcaagccccacgctgggttttcaaagaggaagatccaatccatctgcggtgccacagctggaaaaacaccgctctccacaaagtcacatacctgcaaaatggcaaaggacgcaaatacttccatcacaattccgatttttacattccgaaggctaccctgaaagacagcggcagctatttctgccggggactcgtcggctccaagaatgtgtcctccgaaaccgtgaatatcacgattacccaaggactggctgtgcctacaatctctagcttctttccgcctggataccaagtctccttctgtcttgtgatggtcctcctgtttgctgtggacacaggactgtacttttccgtgaaaacgaacatccgcagctccacacgcgattggaaagatcacaagtttaaatggcgcaaagatccccaggacaag

SEQ ID NO: 9176 - DNA, 1497 bp, Artificial Sequence
  Synthetic Polynucleotide
atggccttaccagtgaccgccttgctcctgccgctggccttgctgctccacgccgccaggccggacatccagatgacacagagccctagcagcctgtctgccagcgtgggagacagagtgaccatcacatgcaaggccagccaggatgtgggcacagccgtggattggtatcagcagaagcctggcaaggcccctaagctgctgatctactgggccagcacaagacacacaggcgtgcccagcagattttctggcagcggctctggcaccgacttcaccctgacaatatccagcctccagcctgaggacttcgccacctactactgccagcagtacaacagctaccctctgaccttcggccagggcaccaaggtggaaatcaaaagaggcggaggcggaagtggaggcggaggatctggcggcggaggctctgaagttcagctgcaacagtctggccccgagctggttaagcctggaacaagcgtgcggatctcctgcaagaccagcggctacaccttcaccgagtacaccatccactgggtcaagcagagccacggcaagagcctggaatggatcggcaacatcaaccccaacaacggcggcaccacctacaaccagaagttcgaggacaaggccacactgaccgtggacaagagcagcagcaccgcctacatggaactgagaagcctgaccagcgaggacagcgccgtgtactattgtgccgccggatggaacttcgactactggggccagggaacaaccctgaccgttagctctacgcgtggaatgaggactgaggatcttcccaaagctgtcgtctttctcgaaccccaatggtatcgggtgctcgaaaaagactctgtgacactgaaatgccaaggggcctactctcccgaggacaactccacacagtggtttcataatgagtccctcatcagctctcaggccagctcttatttcattgatgccgctacagtggacgactccggcgagtatcggtgtcagaccaatctgtctacactgtctgaccccgtgcagcttgaggtccacattggatggttgctcttgcaagccccacgctgggttttcaaagaggaagatccaatccatctgcggtgccacagctggaaaaacaccgctctccacaaagtcacatacctgcaaaatggcaaaggacgcaaatacttccatcacaattccgatttttacattccgaaggctaccctgaaagacagcggcagctatttctgccggggactcgtcggctccaagaatgtgtcctccgaaaccgtgaatatcacgattacccaaggactggctgtgcctacaatctctagcttctttccgcctggataccaagtctccttctgtcttgtgatggtcctcctgtttgctgtggacacaggactgtacttttccgtgaaaacgaacatccgcagctccacacgcgattggaaagatcacaagtttaaatggcgcaaagatccccaggacaag

SEQ ID NO: 9177 - DNA, 1497 bp, Artificial Sequence
  Synthetic Polynucleotide
atggccttaccagtgaccgccttgctcctgccgctggccttgctgctccacgccgccaggccggacatcgtgatgacccagagccacaagttcatgagcaccagcgtgggcgacagagtgtccatcatctgcaaggccagccaggatgtgggcacagccgtggattggtatcagcagaagcctggacagagccccaagctgctgatctactgggccagcacaagacacaccggcgtgcccgatagattcacaggctctggcagcggcaccgatttcaccctggccatcacaaacgtgcagagcgaggacctggccgactacttctgccagcagtacaacagctaccctctgacctttggagccggcaccaagctggaaatcaagagaggcggaggcggaagtggaggcggaggatctggcggcggaggctctgaagtgcagctggttgaatcaggtggcggcctggttcaacctggcggatctctgagactgagctgtgccgccagcggctacacctttaccgagtacacaatccactgggtccgacaggcccctggcaaaggacttgagtgggtcgccaacatcaaccccaacaatggcggcaccacctacaaccagaagttcgaggacagattcaccatcagccgggacaacagcaagaacaccctgtacctccagatgaactccctgagagccgaggacaccgccgtgtactattgtgccagaggctggaacttcgactactggggccagggaacactggtcaccgttagctctacgcgtggaatgaggactgaggatcttcccaaagctgtcgtctttctcgaaccccaatggtatcgggtgctcgaaaaagactctgtgacactgaaatgccaaggggcctactctcccgaggacaactccacacagtggtttcataatgagtccctcatcagctctcaggccagctcttatttcattgatgccgctacagtggacgactccggcgagtatcggtgtcagaccaatctgtctacactgtctgaccccgtgcagcttgaggtccacattggatggttgctcttgcaagccccacgctgggttttcaaagaggaagatccaatccatctgcggtgccacagctggaaaaacaccgctctccacaaagtcacatacctgcaaaatggcaaaggacgcaaatacttccatcacaattccgatttttacattccgaaggctaccctgaaagacagcggcagctatttctgccggggactcgtcggctccaagaatgtgtcctccgaaaccgtgaatatcacgattacccaaggactggctgtgcctacaatctctagcttctttccgcctggataccaagtctccttctgtcttgtgatggtcctcctgtttgctgtggacacaggactgtacttttccgtgaaaacgaacatccgcagctccacacgcgattggaaagatcacaagtttaaatggcgcaaagatccccaggacaag

SEQ ID NO: 9178 - DNA, 1515 bp, Artificial Sequence
  Synthetic Polynucleotide
atggccttaccagtgaccgccttgctcctgccgctggccttgctgctccacgccgccaggccggagatcgtgctgacacagtctcccgccacactgtcactgtctccaggcgaaagagccacactgagctgtagcgccaccagcagcgtgtcctacatccactggtatcagcagaagcccggacaggcccctagactgctgatctacagcaccagcaatctggcctctggcatccccgccagattttctggctctggaagcggcaccgacttcaccctgacaatcggcagactggaacccgaggacttcgccgtgtactactgccagcagagaagcagcagccccttcacctttggacagggcaccaaggtggaaatcaagagaggcggaggcggaagtggaggcggaggatctggcggcggaggctctgaagtgcagctggttgagtctggcggcggactggttaagcctgagggaagcctgagactgtcttgtgccgccagcggcttcaccttcagcagatacggcatgagctgggtccgacaggctcctggcaaaggactggaatgggtgtccacaatttccggcggaggcacctacatctactaccccgatagcgtgaagggcagattcaccatctccagagacaacgccaagaacagcctgttcctccagatgaactccctgagagccgaggacacagccgtgtattattgcgctcgggacaactacggcagaaactacgactacggcatggactactggggccagggcacactggttaccgttagctctacgcgtggaatgaggactgaggatcttcccaaagctgtcgtctttctcgaaccccaatggtatcgggtgctcgaaaaagactctgtgacactgaaatgccaaggggcctactctcccgaggacaactccacacagtggtttcataatgagtccctcatcagctctcaggccagctcttatttcattgatgccgctacagtggacgactccggcgagtatcggtgtcagaccaatctgtctacactgtctgaccccgtgcagcttgaggtccacattggatggttgctcttgcaagccccacgctgggttttcaaagaggaagatccaatccatctgcggtgccacagctggaaaaacaccgctctccacaaagtcacatacctgcaaaatggcaaaggacgcaaatacttccatcacaattccgatttttacattccgaaggctaccctgaaagacagcggcagctatttctgccggggactcgtcggctccaagaatgtgtcctccgaaaccgtgaatatcacgattacccaaggactggctgtgcctacaatctctagcttctttccgcctggataccaagtctccttctgtcttgtgatggtcctcctgtttgctgtggacacaggactgtacttttccgtgaaaacgaacatccgcagctccacacgcgattggaaagatcacaagtttaaatggcgcaaagatccccaggacaag

SEQ ID NO: 9179 - DNA, 1512 bp, Artificial Sequence
  Synthetic Polynucleotide
atggccttaccagtgaccgccttgctcctgccgctggccttgctgctccacgccgccaggccgcagatcgtgctgacacagagccctgccatcatgagtgcctctccaggcgaggaagtgaccctgacctgtagcgccaccagcagcgtgtcctacatccactggtttcagcagaggcccggcacaagccctaagctgtggatctacagcaccagcaatctggcctctggcgtgccagtgcggtttagcggatctggctacggcaccagctacagcctgaccatcagcagaatggaagccgaggatgccgccacctactactgccagcagagaagcagcagccccttcacatttggcagcggcaccaagctggaaatcaaaggcggaggcggaagtggaggcggaggatctggcggcggaggctctgaagtgaaggtggtggaatctggcggcgacctggttaagcctggcggatctctgaagctgagctgtgtggtgtccggcttcaccttcagcagatacggcatgagctgggtccgacagacccctggcaaaagactggaatgggtcgccacaatttccggcggaggcacctacatctactaccccgatagcgtgaagggcagattcaccatctccagagacaacgccaagaacaccctgtacctccagatgagcagcctgaagtctgaggacaccgccatgtaccactgcaccagggacaactacggcagaaactacgactacggcatggactactggggccagggcacaagcgtgacagtctcttctacgcgtggaatgaggactgaggatcttcccaaagctgtcgtctttctcgaaccccaatggtatcgggtgctcgaaaaagactctgtgacactgaaatgccaaggggcctactctcccgaggacaactccacacagtggtttcataatgagtccctcatcagctctcaggccagctcttatttcattgatgccgctacagtggacgactccggcgagtatcggtgtcagaccaatctgtctacactgtctgaccccgtgcagcttgaggtccacattggatggttgctcttgcaagccccacgctgggttttcaaagaggaagatccaatccatctgcggtgccacagctggaaaaacaccgctctccacaaagtcacatacctgcaaaatggcaaaggacgcaaatacttccatcacaattccgatttttacattccgaaggctaccctgaaagacagcggcagctatttctgccggggactcgtcggctccaagaatgtgtcctccgaaaccgtgaatatcacgattacccaaggactggctgtgcctacaatctctagcttctttccgcctggataccaagtctccttctgtcttgtgatggtcctcctgtttgctgtggacacaggactgtacttttccgtgaaaacgaacatccgcagctccacacgcgattggaaagatcacaagtttaaatggcgcaaagatccccaggacaag

SEQ ID NO: 9180 - DNA, 1530 bp, Artificial Sequence
  Synthetic Polynucleotide
atggccttaccagtgaccgccttgctcctgccgctggccttgctgctccacgccgccaggccggacatcgtgctgacacagagccctgcttctctggccgtttctcctggacagagggccaccatcacatgcagagccagcaagagcgtgtccaccagcggctacagctacatgcactggtatcagcagaagcccggccagcctcctaagctgctgatctacctggcctccaacctggaaagcggagtgcctgccagattttctggcagcggctctggcaccgacttcaccctgacaatcaaccccgtggaagccaacgacaccgccaactactactgccagcacagcagagagctgcccttcacatttggcggaggcaccaaggtggaaatcaagagaacaggcggaggcggaagtggaggcggaggatctggcggcggaggctctgaagtgcagctggttgagtctggcggcggacttgtgaaacctggcggaagcctgagactgagctgtgccgcttccggctttacctttagcggctacgccatgagctgggtccgacaggctcctggcaaaggactggaatgggtgtccacaatcagcagcggcggcacctacatctactaccccgatagcgtgaaaggccggttcaccatcagccgggacaacgccaagaacagcctgtacctccagatgaactccctgagagccgaggacaccgccgtgtactattgtgccagactcggcggcgacaattactacgagtatttcgacgtgtggggcaagggcaccaccgtgacagtttcttctacgcgtggaatgaggactgaggatcttcccaaagctgtcgtctttctcgaaccccaatggtatcgggtgctcgaaaaagactctgtgacactgaaatgccaaggggcctactctcccgaggacaactccacacagtggtttcataatgagtccctcatcagctctcaggccagctcttatttcattgatgccgctacagtggacgactccggcgagtatcggtgtcagaccaatctgtctacactgtctgaccccgtgcagcttgaggtccacattggatggttgctcttgcaagccccacgctgggttttcaaagaggaagatccaatccatctgcggtgccacagctggaaaaacaccgctctccacaaagtcacatacctgcaaaatggcaaaggacgcaaatacttccatcacaattccgatttttacattccgaaggctaccctgaaagacagcggcagctatttctgccggggactcgtcggctccaagaatgtgtcctccgaaaccgtgaatatcacgattacccaaggactggctgtgcctacaatctctagcttctttccgcctggataccaagtctccttctgtcttgtgatggtcctcctgtttgctgtggacacaggactgtacttttccgtgaaaacgaacatccgcagctccacacgcgattggaaagatcacaagtttaaatggcgcaaagatccccaggacaag

SEQ ID NO: 9181 - DNA, 1503 bp, Artificial Sequence
  Synthetic Polynucleotide
atggccttaccagtgaccgccttgctcctgccgctggccttgctgctccacgccgccaggccggacatccagatgacacagagccctagcagcctgtccgtgtccgtgggagacagagtgaccatcacatgcaaggccagccagaacgtgcggacagtggtggcttggtatcagcagaagcctggactggcccctaagacactgatctacctggcctccaacagacacaccggcgtgccaagcagattttctggcagcggctctggcaccgacttcaccttcacaatatccagcctccagcctgaggacattgccacctacttttgccagcagcactggtcttaccctctgacctttggacagggcaccaaggtggaagtgaagagaggcggaggcggaagtggaggcggaggatctggcggcggaggctctgaagttcagctgcttgaatctggcggcggactggttcaacctggcggatctctgagactgagctgtgccgcctctggcttcgccttcagcacctacgatatgagctgggtccgacaggcccctggcaaaggacttgaatgggtcgccacaatcagcagcggcggcagctacacctactacctggatagcgtgaagggcagattcaccatcagccgggacagcagcaagaacaccctgtacctccagatgaactccctccaggccgaggactccgccatctactattgtgcccctaccaccgtggtgcctttcgcctattggggacagggaaccctggtcaccgttagctctacgcgtggaatgaggactgaggatcttcccaaagctgtcgtctttctcgaaccccaatggtatcgggtgctcgaaaaagactctgtgacactgaaatgccaaggggcctactctcccgaggacaactccacacagtggtttcataatgagtccctcatcagctctcaggccagctcttatttcattgatgccgctacagtggacgactccggcgagtatcggtgtcagaccaatctgtctacactgtctgaccccgtgcagcttgaggtccacattggatggttgctcttgcaagccccacgctgggttttcaaagaggaagatccaatccatctgcggtgccacagctggaaaaacaccgctctccacaaagtcacatacctgcaaaatggcaaaggacgcaaatacttccatcacaattccgatttttacattccgaaggctaccctgaaagacagcggcagctatttctgccggggactcgtcggctccaagaatgtgtcctccgaaaccgtgaatatcacgattacccaaggactggctgtgcctacaatctctagcttctttccgcctggataccaagtctccttctgtcttgtgatggtcctcctgtttgctgtggacacaggactgtacttttccgtgaaaacgaacatccgcagctccacacgcgattggaaagatcacaagtttaaatggcgcaaagatccccaggacaag

SEQ ID NO: 9182 - DNA, 1515 bp, Artificial Sequence
  Synthetic Polynucleotide
atggccttaccagtgaccgccttgctcctgccgctggccttgctgctccacgccgccaggccggacattcagatgacacagagccctagcagcctgagcgcctctgtgggagacagagtgaccatcacatgcaagagcagccagagcctgctgtactccagcaatcagaagaactacctggcctggttccagcagaagcctggcaaggctcctaagctgctgatctactgggccagcaccagagaaagcggcgtgccaagcagattttctggcagcggctctggcaccgacttcaccctgacaatatccagcctccagcctgaggacttcgccacctacttttgccaccagtacctgagcagctacacattcggacagggcaccaaggtggaaatcaagcggggcggaggcggaagtggaggcggaggatctggcggcggaggctctgaggtgcagctggttgaatctggcggaggactggttcagcctggcggatctctgagactgtcttgtgccgccagcggctacaccttcaccagctattggctgcactgggtccgacaggcccctggcaaaggacttgagtgggtcggatatatcaggcccagcaccggctacacagagtacaaccagaagttcaaggaccgcttcaccatcagcgccgacaccagcaagaataccgcctacctccagatgaacagcctgagagccgaggacaccgccgtgtactactgtgccagatccagatggctgctggactattggggccagggcacactggttacagttagctctacgcgtggaatgaggactgaggatcttcccaaagctgtcgtctttctcgaaccccaatggtatcgggtgctcgaaaaagactctgtgacactgaaatgccaaggggcctactctcccgaggacaactccacacagtggtttcataatgagtccctcatcagctctcaggccagctcttatttcattgatgccgctacagtggacgactccggcgagtatcggtgtcagaccaatctgtctacactgtctgaccccgtgcagcttgaggtccacattggatggttgctcttgcaagccccacgctgggttttcaaagaggaagatccaatccatctgcggtgccacagctggaaaaacaccgctctccacaaagtcacatacctgcaaaatggcaaaggacgcaaatacttccatcacaattccgatttttacattccgaaggctaccctgaaagacagcggcagctatttctgccggggactcgtcggctccaagaatgtgtcctccgaaaccgtgaatatcacgattacccaaggactggctgtgcctacaatctctagcttctttccgcctggataccaagtctccttctgtcttgtgatggtcctcctgtttgctgtggacacaggactgtacttttccgtgaaaacgaacatccgcagctccacacgcgattggaaagatcacaagtttaaatggcgcaaagatccccaggacaag

SEQ ID NO: 9183 - DNA, 1512 bp, Artificial Sequence
  Synthetic Polynucleotide
atggccttaccagtgaccgccttgctcctgccgctggccttgctgctccacgccgccaggccggacattcagatgacacagagccctagcagcctgagcgcctctgtgggagacagagtgaccatcacatgcaagagcagccagagcgtgctgtactccagcaatcagaagaactacctggcctggttccagcagaagcctggcaaggctcctaagctgctgatctactgggccagcaccagagaaagcggcgtgccaagcagattttctggcagcggctctggcaccgacttcaccctgacaatatccagcctccagcctgaggacttcgccacctacttttgccaccagtacctgagcagctacacattcggacagggcaccaaggtggaaatcaagcggggcggaggcggaagtggaggcggaggatctggcggcggaggctctgaggtgcagctggttgaatctggcggaggactggttcagcctggcggatctctgagactgtcttgtgccgccagcggcttcaccttcaccacctattggatgcactgggtccgacaggcccctggcaaaggacttgagtgggtcggatatatcaggcccagcaccggctacacagagtacaaccagaagttcaaggaccgcttcaccatcagcgccgacaccagcaagaataccgcctacctccagatgaacagcctgagagccgaggacaccgccgtgtactactgtgccagatccagatggctgctggactattggggccagggcacactggttacagtttctacgcgtggaatgaggactgaggatcttcccaaagctgtcgtctttctcgaaccccaatggtatcgggtgctcgaaaaagactctgtgacactgaaatgccaaggggcctactctcccgaggacaactccacacagtggtttcataatgagtccctcatcagctctcaggccagctcttatttcattgatgccgctacagtggacgactccggcgagtatcggtgtcagaccaatctgtctacactgtctgaccccgtgcagcttgaggtccacattggatggttgctcttgcaagccccacgctgggttttcaaagaggaagatccaatccatctgcggtgccacagctggaaaaacaccgctctccacaaagtcacatacctgcaaaatggcaaaggacgcaaatacttccatcacaattccgatttttacattccgaaggctaccctgaaagacagcggcagctatttctgccggggactcgtcggctccaagaatgtgtcctccgaaaccgtgaatatcacgattacccaaggactggctgtgcctacaatctctagcttctttccgcctggataccaagtctccttctgtcttgtgatggtcctcctgtttgctgtggacacaggactgtacttttccgtgaaaacgaacatccgcagctccacacgcgattggaaagatcacaagtttaaatggcgcaaagatccccaggacaag

SEQ ID NO: 9184 - DNA, 1512 bp, Artificial Sequence
  Synthetic Polynucleotide
atggccttaccagtgaccgccttgctcctgccgctggccttgctgctccacgccgccaggccggaggtgcagctggttgaatctggcggaggactggttcagcctggcggatctctgagactgtcttgtgccgccagcggctacaccttcaccacctattggatgcactgggtccgacaggcccctggcaaaggacttgagtgggtcggatatatcaggcccagcaccggctacacagagtacaaccagaagttcaaggaccgcttcaccatcagcgccgacaccagcaagaataccgcctacctccagatgaacagcctgagagccgaggacaccgccgtgtactactgtgccagatccagatggctgctggactattggggccagggcacactggttacagtttctggcggaggcggaagtggaggcggaggatctggcggcggaggctctgacattcagatgacacagagccctagcagcctgagcgcctctgtgggagacagagtgaccatcacatgcaagagcagccagagcctgctgtactccagcaatcagaagaactacctggcctggttccagcagaagcctggcaaggctcctaagctgctgatctactgggccagcaccagagaaagcggcgtgccaagcagattttctggcagcggctctggcaccgacttcaccctgacaatatccagcctccagcctgaggacttcgccacctacttttgccaccagtacctgagcagctacacattcggacagggcaccaaggtggaaatcaagcggacgcgtggaatgaggactgaggatcttcccaaagctgtcgtctttctcgaaccccaatggtatcgggtgctcgaaaaagactctgtgacactgaaatgccaaggggcctactctcccgaggacaactccacacagtggtttcataatgagtccctcatcagctctcaggccagctcttatttcattgatgccgctacagtggacgactccggcgagtatcggtgtcagaccaatctgtctacactgtctgaccccgtgcagcttgaggtccacattggatggttgctcttgcaagccccacgctgggttttcaaagaggaagatccaatccatctgcggtgccacagctggaaaaacaccgctctccacaaagtcacatacctgcaaaatggcaaaggacgcaaatacttccatcacaattccgatttttacattccgaaggctaccctgaaagacagcggcagctatttctgccggggactcgtcggctccaagaatgtgtcctccgaaaccgtgaatatcacgattacccaaggactggctgtgcctacaatctctagcttctttccgcctggataccaagtctccttctgtcttgtgatggtcctcctgtttgctgtggacacaggactgtacttttccgtgaaaacgaacatccgcagctccacacgcgattggaaagatcacaagtttaaatggcgcaaagatccccaggacaag

SEQ ID NO: 9185 - DNA, 1503 bp, Artificial Sequence
  Synthetic Polynucleotide
atggccttaccagtgaccgccttgctcctgccgctggccttgctgctccacgccgccaggccggacatccagatgacacagagccctagcagcctgtctgccagcgtgggagacagagtgaccatcacctgtagagccagccaggacatcagcaactacctgaactggtatcagcagaagcccggcaaggcccctaagctgctgatctactacaccagcagactgcacagcggcgtgcccagcagattttctggctctggcagcggcaccgacttcaccctgacaatatctagcctccagcctgaggacttcgccacctactattgccagcagggcaacaccctgccttacacatttggacagggcaccaaggtggaaatcaagagaggcggaggcggaagtggaggcggaggatctggcggcggaggctctgaagtgcagctggttgaatcaggtggcggcctggttcaacctggcggatctctgagactgagctgtgccgccagcggctacaccttcagcgactactttatgagctgggtccgacaggcccctggcaaaggacttgaatgggtcgccaccatcagcaatggcggcacctacacttactaccccgacagcgtgaagggcagattcaccatctccagagacaacagcaagaacaccctgtacctccagatgaactccctgagagccgaggacaccgccgtgtactactgcgccagattcgacggctacatcttcgactattggggccagggcaccctggtcacagtctcttctacgcgtggaatgaggactgaggatcttcccaaagctgtcgtctttctcgaaccccaatggtatcgggtgctcgaaaaagactctgtgacactgaaatgccaaggggcctactctcccgaggacaactccacacagtggtttcataatgagtccctcatcagctctcaggccagctcttatttcattgatgccgctacagtggacgactccggcgagtatcggtgtcagaccaatctgtctacactgtctgaccccgtgcagcttgaggtccacattggatggttgctcttgcaagccccacgctgggttttcaaagaggaagatccaatccatctgcggtgccacagctggaaaaacaccgctctccacaaagtcacatacctgcaaaatggcaaaggacgcaaatacttccatcacaattccgatttttacattccgaaggctaccctgaaagacagcggcagctatttctgccggggactcgtcggctccaagaatgtgtcctccgaaaccgtgaatatcacgattacccaaggactggctgtgcctacaatctctagcttctttccgcctggataccaagtctccttctgtcttgtgatggtcctcctgtttgctgtggacacaggactgtacttttccgtgaaaacgaacatccgcagctccacacgcgattggaaagatcacaagtttaaatggcgcaaagatccccaggacaag

SEQ ID NO: 9186 - DNA, 1503 bp, Artificial Sequence
  Synthetic Polynucleotide
atggccttaccagtgaccgccttgctcctgccgctggccttgctgctccacgccgccaggccggacatccagatgacacagagccctagcagcctgtctgccagcgtgggagacagagtgaccatcacctgtagagccagccaggacatcagcagctacctgaactggtatcagcagaagcccggcaaggcccctaagctgctgatctactacaccagcagactgcacagcggcgtgcccagcagattttctggctctggcagcggcaccgacttcaccctgacaatatctagcctccagcctgaggacttcgccacctactattgccagcagggcaacaccctgccttacacatttggacagggcaccaaggtggaaatcaagagaggcggaggcggaagtggaggcggaggatctggcggcggaggctctgaagtgcagctggttgaatcaggtggcggcctggttcaacctggcggatctctgagactgagctgtgccgccagcggcttcaccttcagcgactactttatgagctgggtccgacaggcccctggcaaaggacttgaatgggtcgccaccatcagcaatggcggcacctacacttactaccccgacagcgtgaagggcagattcaccatctccagagacaacagcaagaacaccctgtacctccagatgaactccctgagagccgaggacaccgccgtgtactactgcgccagattcgacggctacatcttcgactattggggccagggcaccctggtcacagtctcttctacgcgtggaatgaggactgaggatcttcccaaagctgtcgtctttctcgaaccccaatggtatcgggtgctcgaaaaagactctgtgacactgaaatgccaaggggcctactctcccgaggacaactccacacagtggtttcataatgagtccctcatcagctctcaggccagctcttatttcattgatgccgctacagtggacgactccggcgagtatcggtgtcagaccaatctgtctacactgtctgaccccgtgcagcttgaggtccacattggatggttgctcttgcaagccccacgctgggttttcaaagaggaagatccaatccatctgcggtgccacagctggaaaaacaccgctctccacaaagtcacatacctgcaaaatggcaaaggacgcaaatacttccatcacaattccgatttttacattccgaaggctaccctgaaagacagcggcagctatttctgccggggactcgtcggctccaagaatgtgtcctccgaaaccgtgaatatcacgattacccaaggactggctgtgcctacaatctctagcttctttccgcctggataccaagtctccttctgtcttgtgatggtcctcctgtttgctgtggacacaggactgtacttttccgtgaaaacgaacatccgcagctccacacgcgattggaaagatcacaagtttaaatggcgcaaagatccccaggacaag

SEQ ID NO: 9187 - DNA, 1503 bp, Artificial Sequence
  Synthetic Polynucleotide
atggccttaccagtgaccgccttgctcctgccgctggccttgctgctccacgccgccaggccggacatccagatgacacagagccctagcagcctgtctgccagcgtgggagacagagtgaccatcacctgtagagccagccaggacatcagcaactacctgaactggtatcagcagaagcccggcaaggcccctaagctgctgatctactacaccagcagactgcacagcggcgtgcccagcagattttctggctctggcagcggcaccgacttcaccctgacaatatctagcctccagcctgaggacttcgccacctactattgccagcagggcaacaccctgccttggacatttggacagggcaccaaggtggaaatcaagagaggcggaggcggaagtggaggcggaggatctggcggcggaggctctgaagtgcagctggttgaatcaggtggcggcctggttcaacctggcggatctctgagactgagctgtgccgccagcggcttcaccttcagcgactactttatgagctgggtccgacaggcccctggcaaaggacttgaatgggtcgccaccatcagcaatggcggcacctacacttactaccccgacagcgtgaagggcagattcaccatctccagagacaacagcaagaacaccctgtacctccagatgaactccctgagagccgaggacaccgccgtgtactactgcgccagattcgacggctacatcttcgactattggggccagggcaccctggtcacagtctcttctacgcgtggaatgaggactgaggatcttcccaaagctgtcgtctttctcgaaccccaatggtatcgggtgctcgaaaaagactctgtgacactgaaatgccaaggggcctactctcccgaggacaactccacacagtggtttcataatgagtccctcatcagctctcaggccagctcttatttcattgatgccgctacagtggacgactccggcgagtatcggtgtcagaccaatctgtctacactgtctgaccccgtgcagcttgaggtccacattggatggttgctcttgcaagccccacgctgggttttcaaagaggaagatccaatccatctgcggtgccacagctggaaaaacaccgctctccacaaagtcacatacctgcaaaatggcaaaggacgcaaatacttccatcacaattccgatttttacattccgaaggctaccctgaaagacagcggcagctatttctgccggggactcgtcggctccaagaatgtgtcctccgaaaccgtgaatatcacgattacccaaggactggctgtgcctacaatctctagcttctttccgcctggataccaagtctccttctgtcttgtgatggtcctcctgtttgctgtggacacaggactgtacttttccgtgaaaacgaacatccgcagctccacacgcgattggaaagatcacaagtttaaatggcgcaaagatccccaggacaag

SEQ ID NO: 9188 - DNA, 1518 bp, Artificial Sequence
  Synthetic Polynucleotide
atggccttaccagtgaccgccttgctcctgccgctggccttgctgctccacgccgccaggccgagctacgtgctgacacagcctccatccgtgtctgtggctccaggacagaccgccagaatcacatgcggcggcaacaacatcggcagcaagaccgtgcactggtatcagcagccacctggacaggctccagtggtggtggtgtacgacgacagcgatagacctagcggcatccccgagagattcagcggcagcaattccggcaataccgccacactgaccatcagcagagtggaagctggcgacgaggccgtgtactactgccaagtgtgggacagcagcagcgatcacgtggtgtttggcggcggaacaaagctgacagtgcttggcggaggcggaagtggaggcggaggatctggcggcggaggctctcaactccagctgcaagagtctggccctggcctggtcaagcctagcgaaacactgagcctgacctgtaccgtgtctggcggctctatcagctccagcagctatttctggggctggatcagacaacctcctggcaaaggactggaatggatcggctccatctactacagcggcatcacctactacaaccccagcctgaagtccagagtgaccatctccgtggacaccagcaagaaccagttctccctgaagctgagcagcgtgacagccgccgataccgccgtgtattattgtgccagacatgacggcgctgtggccggcctgtttgattattggggacagggcaccctggtcaccgtgtcatctgctacgcgtggaatgaggactgaggatcttcccaaagctgtcgtctttctcgaaccccaatggtatcgggtgctcgaaaaagactctgtgacactgaaatgccaaggggcctactctcccgaggacaactccacacagtggtttcataatgagtccctcatcagctctcaggccagctcttatttcattgatgccgctacagtggacgactccggcgagtatcggtgtcagaccaatctgtctacactgtctgaccccgtgcagcttgaggtccacattggatggttgctcttgcaagccccacgctgggttttcaaagaggaagatccaatccatctgcggtgccacagctggaaaaacaccgctctccacaaagtcacatacctgcaaaatggcaaaggacgcaaatacttccatcacaattccgatttttacattccgaaggctaccctgaaagacagcggcagctatttctgccggggactcgtcggctccaagaatgtgtcctccgaaaccgtgaatatcacgattacccaaggactggctgtgcctacaatctctagcttctttccgcctggataccaagtctccttctgtcttgtgatggtcctcctgtttgctgtggacacaggactgtacttttccgtgaaaacgaacatccgcagctccacacgcgattggaaagatcacaagtttaaatggcgcaaagatccccaggacaag

SEQ ID NO: 9189 - DNA, 1518 bp, Artificial Sequence
  Synthetic Polynucleotide
atggccttaccagtgaccgccttgctcctgccgctggccttgctgctccacgccgccaggccgagctacgtgctgacacagcctccatccgtgtctgtggctccaggacagaccgccagaatcacatgcggcggcaagaacatcggcagcaagagcgtgcactggtatcagcagccacctggacaggctccagtggtggtggtgtacgacgacagcgatagacctagcggcatccccgagagattcagcggcagcaattccggcaataccgccacactgaccatcagcagagtggaagctggcgacgaggccgtgtactactgccaagtgtgggacagcagcagcgatcacgtggtgtttggcggcggaacaaagctgacagtgcttggcggaggcggaagtggaggcggaggatctggcggcggaggctctcaactccagctgcaagagtctggccctggcctggtcaagcctagcgaaacactgagcctgacctgtaccgtgtctggcggctctatcagctccggcagctatatctggggctggatcagacaacctcctggcaaaggactggaatggatcggctccatctactacagcggcatcacctactacaaccccagcctgaagtccagagtgaccatctccgtggacaccagcaagaaccagttctccctgaagctgagcagcgtgacagccgccgataccgccgtgtattattgtgccagacatgacggcgctgtggccggcctgtttgattattggggacagggcaccctggtcaccgtgtcatctgctacgcgtggaatgaggactgaggatcttcccaaagctgtcgtctttctcgaaccccaatggtatcgggtgctcgaaaaagactctgtgacactgaaatgccaaggggcctactctcccgaggacaactccacacagtggtttcataatgagtccctcatcagctctcaggccagctcttatttcattgatgccgctacagtggacgactccggcgagtatcggtgtcagaccaatctgtctacactgtctgaccccgtgcagcttgaggtccacattggatggttgctcttgcaagccccacgctgggttttcaaagaggaagatccaatccatctgcggtgccacagctggaaaaacaccgctctccacaaagtcacatacctgcaaaatggcaaaggacgcaaatacttccatcacaattccgatttttacattccgaaggctaccctgaaagacagcggcagctatttctgccggggactcgtcggctccaagaatgtgtcctccgaaaccgtgaatatcacgattacccaaggactggctgtgcctacaatctctagcttctttccgcctggataccaagtctccttctgtcttgtgatggtcctcctgtttgctgtggacacaggactgtacttttccgtgaaaacgaacatccgcagctccacacgcgattggaaagatcacaagtttaaatggcgcaaagatccccaggacaag

SEQ ID NO: 9190 - DNA, 1518 bp, Artificial Sequence
  Synthetic Polynucleotide
atggccttaccagtgaccgccttgctcctgccgctggccttgctgctccacgccgccaggccgagctacgtgctgacacagcctccatccgtgtctgtggctccaggacagaccgccagaatcacatgcggcggcaagaacatcggcagcaagagcgtgcactggtatcagcagccacctggacaggctccagtggtggtggtgtacgacgacagcgatagacctagcggcatccccgagagattcagcggcagcaattccggcaataccgccacactgaccatcagcagagtggaagctggcgacgaggccgtgtactactgccaagtgtgggacagcagcagcgatcacgtggtgtttggcggcggaacaaagctgacagtgcttggcggaggcggaagtggaggcggaggatctggcggcggaggctctcaactccagctgcaagagtctggccctggcctggtcaagcctagcgaaacactgagcctgacctgtaccgtgtctggcggctctatcagctccggcagctatttctggggctggatcagacaacctcctggcaaaggactggaatggatcggctccatctactacagcggcatcacctactacaaccccagcctgaagtccagagtgaccatctccgtggacaccagcaagaaccagttctccctgaagctgagcagcgtgacagccgccgataccgccgtgtattattgtgccagacatgacggcgctatggccggcctgtttgattattggggacagggcaccctggtcaccgtgtcatctgctacgcgtggaatgaggactgaggatcttcccaaagctgtcgtctttctcgaaccccaatggtatcgggtgctcgaaaaagactctgtgacactgaaatgccaaggggcctactctcccgaggacaactccacacagtggtttcataatgagtccctcatcagctctcaggccagctcttatttcattgatgccgctacagtggacgactccggcgagtatcggtgtcagaccaatctgtctacactgtctgaccccgtgcagcttgaggtccacattggatggttgctcttgcaagccccacgctgggttttcaaagaggaagatccaatccatctgcggtgccacagctggaaaaacaccgctctccacaaagtcacatacctgcaaaatggcaaaggacgcaaatacttccatcacaattccgatttttacattccgaaggctaccctgaaagacagcggcagctatttctgccggggactcgtcggctccaagaatgtgtcctccgaaaccgtgaatatcacgattacccaaggactggctgtgcctacaatctctagcttctttccgcctggataccaagtctccttctgtcttgtgatggtcctcctgtttgctgtggacacaggactgtacttttccgtgaaaacgaacatccgcagctccacacgcgattggaaagatcacaagtttaaatggcgcaaagatccccaggacaag

SEQ ID NO: 9191 - DNA, 1518 bp, Artificial Sequence
  Synthetic Polynucleotide
atggccttaccagtgaccgccttgctcctgccgctggccttgctgctccacgccgccaggccgagctacgtgctgacacagcctccatccgtgtctgtggctccaggacagaccgccagaatcacatgcggcggcaagaacatcggcagcaagagcgtgcactggtatcagcagccacctggacaggctccagtggtggtggtgtacgacgacagcgatagacctagcggcatccccgagagattcagcggcagcaattccggcaataccgccacactgaccatcagcagagtggaagctggcgacgaggccgtgtactactgccaagtgtgggacagcagcagcgatcacgtggtgtttggcggcggaacaaagctgacagtgcttggcggaggcggaagtggaggcggaggatctggcggcggaggctctcaactccagctgcaagagtctggccctggcctggtcaagcctagcgaaacactgagcctgacctgtaccgtgtctggcggctctatcagctccggcagctatttctggggctggatcagacaacctcctggcaaaggactggaatggatcggctccatctactacagcggcagcacctactacaaccccagcctgaagtccagagtgaccatctccgtggacaccagcaagaaccagttctccctgaagctgagcagcgtgacagccgccgataccgccgtgtattattgtgccagacatgacggcgctgtggccggcctgtttgattattggggacagggcaccctggtcaccgtgtcatctgctacgcgtggaatgaggactgaggatcttcccaaagctgtcgtctttctcgaaccccaatggtatcgggtgctcgaaaaagactctgtgacactgaaatgccaaggggcctactctcccgaggacaactccacacagtggtttcataatgagtccctcatcagctctcaggccagctcttatttcattgatgccgctacagtggacgactccggcgagtatcggtgtcagaccaatctgtctacactgtctgaccccgtgcagcttgaggtccacattggatggttgctcttgcaagccccacgctgggttttcaaagaggaagatccaatccatctgcggtgccacagctggaaaaacaccgctctccacaaagtcacatacctgcaaaatggcaaaggacgcaaatacttccatcacaattccgatttttacattccgaaggctaccctgaaagacagcggcagctatttctgccggggactcgtcggctccaagaatgtgtcctccgaaaccgtgaatatcacgattacccaaggactggctgtgcctacaatctctagcttctttccgcctggataccaagtctccttctgtcttgtgatggtcctcctgtttgctgtggacacaggactgtacttttccgtgaaaacgaacatccgcagctccacacgcgattggaaagatcacaagtttaaatggcgcaaagatccccaggacaag

SEQ ID NO: 9192 - DNA, 1518 bp, Artificial Sequence
  Synthetic Polynucleotide
atggccttaccagtgaccgccttgctcctgccgctggccttgctgctccacgccgccaggccgagctacgtgctgacacagcctccatccgtgtctgtggctccaggacagaccgccagaatcacatgcggcggcaagaacatcggcagcaagagcgtgcactggtatcagcagccacctggacaggctccagtggtggtggtgtacgacgacagcgatagacctagcggcatccccgagagattcagcggcagcaattccggcaataccgccacactgaccatcagcagagtggaagctggcgacgaggccgtgtactactgccaagtgtgggacagcagcagcgatcacgtggtgtttggcggcggaacaaagctgacagtgcttggcggaggcggaagtggaggcggaggatctggcggcggaggctctcaactccagctgcaagagtctggccctggcctggtcaagcctagcgaaacactgagcctgacctgtaccgtgtctggcggctctatcagctccggcagctatttctggggctggatcagacaacctcctggcaaaggactggaatggatcggctccatctactacagcggcatcagctactacaaccccagcctgaagtccagagtgaccatctccgtggacaccagcaagaaccagttctccctgaagctgagcagcgtgacagccgccgataccgccgtgtattattgtgccagacatgacggcgctgtggccggcctgtttgattattggggacagggcaccctggtcaccgtgtcatctgctacgcgtggaatgaggactgaggatcttcccaaagctgtcgtctttctcgaaccccaatggtatcgggtgctcgaaaaagactctgtgacactgaaatgccaaggggcctactctcccgaggacaactccacacagtggtttcataatgagtccctcatcagctctcaggccagctcttatttcattgatgccgctacagtggacgactccggcgagtatcggtgtcagaccaatctgtctacactgtctgaccccgtgcagcttgaggtccacattggatggttgctcttgcaagccccacgctgggttttcaaagaggaagatccaatccatctgcggtgccacagctggaaaaacaccgctctccacaaagtcacatacctgcaaaatggcaaaggacgcaaatacttccatcacaattccgatttttacattccgaaggctaccctgaaagacagcggcagctatttctgccggggactcgtcggctccaagaatgtgtcctccgaaaccgtgaatatcacgattacccaaggactggctgtgcctacaatctctagcttctttccgcctggataccaagtctccttctgtcttgtgatggtcctcctgtttgctgtggacacaggactgtacttttccgtgaaaacgaacatccgcagctccacacgcgattggaaagatcacaagtttaaatggcgcaaagatccccaggacaag

SEQ ID NO: 9193 - DNA, 1518 bp, Artificial Sequence
  Synthetic Polynucleotide
atggccttaccagtgaccgccttgctcctgccgctggccttgctgctccacgccgccaggccgagctacgtgctgacacagcctccatccgtgtctgtggctccaggacagaccgccagaatcacatgcggcggcaagaacatcggcagcaagagcgtgcactggtatcagcagccacctggacaggctccagtggtggtggtgtacgacgacagcgatagacctagcggcatccccgagagattcagcggcagcaattccggcaataccgccacactgaccatcagcagagtggaagctggcgacgaggccgtgtactactgccaagtgtgggacagcagcagcgatcacgtggtgtttggcggcggaacaaagctgacagtgcttggcggaggcggaagtggaggcggaggatctggcggcggaggctctcaactccagctgcaagagtctggccctggcctggtcaagcctagcgaaacactgagcctgacctgtaccgtgtctggcggctctatcagctccggcagctatttctggggctggatcagacaacctcctggcaaaggactggaatggatcggctccatctactacagcggcatcacctactacaaccccggcctgaagtccagagtgaccatctccgtggacaccagcaagaaccagttctccctgaagctgagcagcgtgacagccgccgataccgccgtgtattattgtgccagacatgacggcgctgtggccggcctgtttgattattggggacagggcaccctggtcaccgtgtcatctgctacgcgtggaatgaggactgaggatcttcccaaagctgtcgtctttctcgaaccccaatggtatcgggtgctcgaaaaagactctgtgacactgaaatgccaaggggcctactctcccgaggacaactccacacagtggtttcataatgagtccctcatcagctctcaggccagctcttatttcattgatgccgctacagtggacgactccggcgagtatcggtgtcagaccaatctgtctacactgtctgaccccgtgcagcttgaggtccacattggatggttgctcttgcaagccccacgctgggttttcaaagaggaagatccaatccatctgcggtgccacagctggaaaaacaccgctctccacaaagtcacatacctgcaaaatggcaaaggacgcaaatacttccatcacaattccgatttttacattccgaaggctaccctgaaagacagcggcagctatttctgccggggactcgtcggctccaagaatgtgtcctccgaaaccgtgaatatcacgattacccaaggactggctgtgcctacaatctctagcttctttccgcctggataccaagtctccttctgtcttgtgatggtcctcctgtttgctgtggacacaggactgtacttttccgtgaaaacgaacatccgcagctccacacgcgattggaaagatcacaagtttaaatggcgcaaagatccccaggacaag

SEQ ID NO: 9194 - DNA, 1518 bp, Artificial Sequence
  Synthetic Polynucleotide
atggccttaccagtgaccgccttgctcctgccgctggccttgctgctccacgccgccaggccgagctacgtgctgacacagcctccatccgtgtctgtggctccaggacagaccgccagaatcacatgcggcggcaagaacatcggcagcaagagcgtgcactggtatcagcagccacctggacaggctccagtggtggtggtgtacgacgacagcgatagacctagcggcatccccgagagattcagcggcagcaattccggcaataccgccacactgaccatcagcagagtggaagctggcgacgaggccgtgtactactgccaagtgtgggacagcagcagcgatcacgtggtgtttggcggcggaacaaagctgacagtgcttggcggaggcggaagtggaggcggaggatctggcggcggaggctctcaactccagctgcaagagtctggccctggcctggtcaagcctagcgaaacactgagcctgacctgtaccgtgtctggcggctctatcagctccggcagctatttctggggctggatcagacaacctcctggcaaaggactggaatggatcggctccatctactacagcggcatcacctactacaaccccaccctgaagtccagagtgaccatctccgtggacaccagcaagaaccagttctccctgaagctgagcagcgtgacagccgccgataccgccgtgtattattgtgccagacatgacggcgctgtggccggcctgtttgattattggggacagggcaccctggtcaccgtgtcatctgctacgcgtggaatgaggactgaggatcttcccaaagctgtcgtctttctcgaaccccaatggtatcgggtgctcgaaaaagactctgtgacactgaaatgccaaggggcctactctcccgaggacaactccacacagtggtttcataatgagtccctcatcagctctcaggccagctcttatttcattgatgccgctacagtggacgactccggcgagtatcggtgtcagaccaatctgtctacactgtctgaccccgtgcagcttgaggtccacattggatggttgctcttgcaagccccacgctgggttttcaaagaggaagatccaatccatctgcggtgccacagctggaaaaacaccgctctccacaaagtcacatacctgcaaaatggcaaaggacgcaaatacttccatcacaattccgatttttacattccgaaggctaccctgaaagacagcggcagctatttctgccggggactcgtcggctccaagaatgtgtcctccgaaaccgtgaatatcacgattacccaaggactggctgtgcctacaatctctagcttctttccgcctggataccaagtctccttctgtcttgtgatggtcctcctgtttgctgtggacacaggactgtacttttccgtgaaaacgaacatccgcagctccacacgcgattggaaagatcacaagtttaaatggcgcaaagatccccaggacaag

SEQ ID NO: 9195 - DNA, 1518 bp, Artificial Sequence; identical to SEQ ID NO: 9152
  Synthetic Polynucleotide

SEQ ID NO: 9196 - DNA, 1518 bp, Artificial Sequence
  Synthetic Polynucleotide
atggccttaccagtgaccgccttgctcctgccgctggccttgctgctccacgccgccaggccgagctacgtgctgacacagcctccatccgtgtctgtggctccaggacagaccgccagaatcacatgcggcggcaacaacctcggcagcaagagcgtgcactggtatcagcagccacctggacaggctccagtggtggtggtgtacgacgacagcgatagacctagcggcatccccgagagattcagcggcagcaattccggcaataccgccacactgaccatcagcagagtggaagctggcgacgaggccgtgtactactgccaagtgtgggacagcagcagcgatcacgtggtgtttggcggcggaacaaagctgacagtgcttggcggaggcggaagtggaggcggaggatctggcggcggaggctctcaactccagctgcaagagtctggccctggcctggtcaagcctagcgaaacactgagcctgacctgtaccgtgtctggcggctctatcagctccggcagctatatctggggctggatcagacaacctcctggcaaaggactggaatggatcggctccatctactacagcggcatcacctactacaaccccagcctgaagtccagagtgaccatctccgtggacaccagcaagaaccagttctccctgaagctgagcagcgtgacagccgccgataccgccgtgtattattgtgccagacatgacggcgctgtggccggcctgtttgattattggggacagggcaccctggtcaccgtgtcatctgctacgcgtggaatgaggactgaggatcttcccaaagctgtcgtctttctcgaaccccaatggtatcgggtgctcgaaaaagactctgtgacactgaaatgccaaggggcctactctcccgaggacaactccacacagtggtttcataatgagtccctcatcagctctcaggccagctcttatttcattgatgccgctacagtggacgactccggcgagtatcggtgtcagaccaatctgtctacactgtctgaccccgtgcagcttgaggtccacattggatggttgctcttgcaagccccacgctgggttttcaaagaggaagatccaatccatctgcggtgccacagctggaaaaacaccgctctccacaaagtcacatacctgcaaaatggcaaaggacgcaaatacttccatcacaattccgatttttacattccgaaggctaccctgaaagacagcggcagctatttctgccggggactcgtcggctccaagaatgtgtcctccgaaaccgtgaatatcacgattacccaaggactggctgtgcctacaatctctagcttctttccgcctggataccaagtctccttctgtcttgtgatggtcctcctgtttgctgtggacacaggactgtacttttccgtgaaaacgaacatccgcagctccacacgcgattggaaagatcacaagtttaaatggcgcaaagatccccaggacaag

SEQ ID NO: 9197 - DNA, 1518 bp, Artificial Sequence
  Synthetic Polynucleotide
atggccttaccagtgaccgccttgctcctgccgctggccttgctgctccacgccgccaggccgagctacgtgctgacacagcctccatccgtgtctgtggctccaggacagaccgccagaatcacatgcggcggcaacaacctcggcagcaagagcgtgcactggtatcagcagccacctggacaggctccagtggtggtggtgtacgacgacagcgatagacctagcggcatccccgagagattcagcggcagcaattccggcaataccgccacactgaccatcagcagagtggaagctggcgacgaggccgtgtactactgccaagtgtgggacagcagcagcgatcacgtggtgtttggcggcggaacaaagctgacagtgcttggcggaggcggaagtggaggcggaggatctggcggcggaggctctcaactccagctgcaagagtctggccctggcctggtcaagcctagcgaaacactgagcctgacctgtaccgtgtctggcggctctatcagctccggcagctatttctggggctggatcagacaacctcctggcaaaggactggaatggatcggctccatctactacagcggcatcacctactacaaccccagcctgaagtccagagtgaccatctccgtggacaccagcaagaaccagttctccctgaagctgagcagcgtgacagccgccgataccgccgtgtattattgtgccagacatgacggcgctatggccggcctgtttgattattggggacagggcaccctggtcaccgtgtcatctgctacgcgtggaatgaggactgaggatcttcccaaagctgtcgtctttctcgaaccccaatggtatcgggtgctcgaaaaagactctgtgacactgaaatgccaaggggcctactctcccgaggacaactccacacagtggtttcataatgagtccctcatcagctctcaggccagctcttatttcattgatgccgctacagtggacgactccggcgagtatcggtgtcagaccaatctgtctacactgtctgaccccgtgcagcttgaggtccacattggatggttgctcttgcaagccccacgctgggttttcaaagaggaagatccaatccatctgcggtgccacagctggaaaaacaccgctctccacaaagtcacatacctgcaaaatggcaaaggacgcaaatacttccatcacaattccgatttttacattccgaaggctaccctgaaagacagcggcagctatttctgccggggactcgtcggctccaagaatgtgtcctccgaaaccgtgaatatcacgattacccaaggactggctgtgcctacaatctctagcttctttccgcctggataccaagtctccttctgtcttgtgatggtcctcctgtttgctgtggacacaggactgtacttttccgtgaaaacgaacatccgcagctccacacgcgattggaaagatcacaagtttaaatggcgcaaagatccccaggacaag

SEQ ID NO: 9198 - DNA, 1518 bp, Artificial Sequence
  Synthetic Polynucleotide
atggccttaccagtgaccgccttgctcctgccgctggccttgctgctccacgccgccaggccgagctacgtgctgacacagcctccatccgtgtctgtggctccaggacagaccgccagaatcacatgcggcggcaacaacctcggcagcaagagcgtgcactggtatcagcagccacctggacaggctccagtggtggtggtgtacgacgacagcgatagacctagcggcatccccgagagattcagcggcagcaattccggcaataccgccacactgaccatcagcagagtggaagctggcgacgaggccgtgtactactgccaagtgtgggacagcagcagcgatcacgtggtgtttggcggcggaacaaagctgacagtgcttggcggaggcggaagtggaggcggaggatctggcggcggaggctctcaactccagctgcaagagtctggccctggcctggtcaagcctagcgaaacactgagcctgacctgtaccgtgtctggcggctctatcagctccggcagctatttctggggctggatcagacaacctcctggcaaaggactggaatggatcggctccatctactacagcggcagcacctactacaaccccagcctgaagtccagagtgaccatctccgtggacaccagcaagaaccagttctccctgaagctgagcagcgtgacagccgccgataccgccgtgtattattgtgccagacatgacggcgctgtggccggcctgtttgattattggggacagggcaccctggtcaccgtgtcatctgctacgcgtggaatgaggactgaggatcttcccaaagctgtcgtctttctcgaaccccaatggtatcgggtgctcgaaaaagactctgtgacactgaaatgccaaggggcctactctcccgaggacaactccacacagtggtttcataatgagtccctcatcagctctcaggccagctcttatttcattgatgccgctacagtggacgactccggcgagtatcggtgtcagaccaatctgtctacactgtctgaccccgtgcagcttgaggtccacattggatggttgctcttgcaagccccacgctgggttttcaaagaggaagatccaatccatctgcggtgccacagctggaaaaacaccgctctccacaaagtcacatacctgcaaaatggcaaaggacgcaaatacttccatcacaattccgatttttacattccgaaggctaccctgaaagacagcggcagctatttctgccggggactcgtcggctccaagaatgtgtcctccgaaaccgtgaatatcacgattacccaaggactggctgtgcctacaatctctagcttctttccgcctggataccaagtctccttctgtcttgtgatggtcctcctgtttgctgtggacacaggactgtacttttccgtgaaaacgaacatccgcagctccacacgcgattggaaagatcacaagtttaaatggcgcaaagatccccaggacaag

SEQ ID NO: 9199 - DNA, 1518 bp, Artificial Sequence
  Synthetic Polynucleotide
atggccttaccagtgaccgccttgctcctgccgctggccttgctgctccacgccgccaggccgagctacgtgctgacacagcctccatccgtgtctgtggctccaggacagaccgccagaatcacatgcggcggcaacaacctcggcagcaagagcgtgcactggtatcagcagccacctggacaggctccagtggtggtggtgtacgacgacagcgatagacctagcggcatccccgagagattcagcggcagcaattccggcaataccgccacactgaccatcagcagagtggaagctggcgacgaggccgtgtactactgccaagtgtgggacagcagcagcgatcacgtggtgtttggcggcggaacaaagctgacagtgcttggcggaggcggaagtggaggcggaggatctggcggcggaggctctcaactccagctgcaagagtctggccctggcctggtcaagcctagcgaaacactgagcctgacctgtaccgtgtctggcggctctatcagctccggcagctatttctggggctggatcagacaacctcctggcaaaggactggaatggatcggctccatctactacagcggcatcagctactacaaccccagcctgaagtccagagtgaccatctccgtggacaccagcaagaaccagttctccctgaagctgagcagcgtgacagccgccgataccgccgtgtattattgtgccagacatgacggcgctgtggccggcctgtttgattattggggacagggcaccctggtcaccgtgtcatctgctacgcgtggaatgaggactgaggatcttcccaaagctgtcgtctttctcgaaccccaatggtatcgggtgctcgaaaaagactctgtgacactgaaatgccaaggggcctactctcccgaggacaactccacacagtggtttcataatgagtccctcatcagctctcaggccagctcttatttcattgatgccgctacagtggacgactccggcgagtatcggtgtcagaccaatctgtctacactgtctgaccccgtgcagcttgaggtccacattggatggttgctcttgcaagccccacgctgggttttcaaagaggaagatccaatccatctgcggtgccacagctggaaaaacaccgctctccacaaagtcacatacctgcaaaatggcaaaggacgcaaatacttccatcacaattccgatttttacattccgaaggctaccctgaaagacagcggcagctatttctgccggggactcgtcggctccaagaatgtgtcctccgaaaccgtgaatatcacgattacccaaggactggctgtgcctacaatctctagcttctttccgcctggataccaagtctccttctgtcttgtgatggtcctcctgtttgctgtggacacaggactgtacttttccgtgaaaacgaacatccgcagctccacacgcgattggaaagatcacaagtttaaatggcgcaaagatccccaggacaag

SEQ ID NO: 9200 - DNA, 1518 bp, Artificial Sequence
  Synthetic Polynucleotide
atggccttaccagtgaccgccttgctcctgccgctggccttgctgctccacgccgccaggccgagctacgtgctgacacagcctccatccgtgtctgtggctccaggacagaccgccagaatcacatgcggcggcaacaacctcggcagcaagagcgtgcactggtatcagcagccacctggacaggctccagtggtggtggtgtacgacgacagcgatagacctagcggcatccccgagagattcagcggcagcaattccggcaataccgccacactgaccatcagcagagtggaagctggcgacgaggccgtgtactactgccaagtgtgggacagcagcagcgatcacgtggtgtttggcggcggaacaaagctgacagtgcttggcggaggcggaagtggaggcggaggatctggcggcggaggctctcaactccagctgcaagagtctggccctggcctggtcaagcctagcgaaacactgagcctgacctgtaccgtgtctggcggctctatcagctccggcagctatttctggggctggatcagacaacctcctggcaaaggactggaatggatcggctccatctactacagcggcatcacctactacaaccccggcctgaagtccagagtgaccatctccgtggacaccagcaagaaccagttctccctgaagctgagcagcgtgacagccgccgataccgccgtgtattattgtgccagacatgacggcgctgtggccggcctgtttgattattggggacagggcaccctggtcaccgtgtcatctgctacgcgtggaatgaggactgaggatcttcccaaagctgtcgtctttctcgaaccccaatggtatcgggtgctcgaaaaagactctgtgacactgaaatgccaaggggcctactctcccgaggacaactccacacagtggtttcataatgagtccctcatcagctctcaggccagctcttatttcattgatgccgctacagtggacgactccggcgagtatcggtgtcagaccaatctgtctacactgtctgaccccgtgcagcttgaggtccacattggatggttgctcttgcaagccccacgctgggttttcaaagaggaagatccaatccatctgcggtgccacagctggaaaaacaccgctctccacaaagtcacatacctgcaaaatggcaaaggacgcaaatacttccatcacaattccgatttttacattccgaaggctaccctgaaagacagcggcagctatttctgccggggactcgtcggctccaagaatgtgtcctccgaaaccgtgaatatcacgattacccaaggactggctgtgcctacaatctctagcttctttccgcctggataccaagtctccttctgtcttgtgatggtcctcctgtttgctgtggacacaggactgtacttttccgtgaaaacgaacatccgcagctccacacgcgattggaaagatcacaagtttaaatggcgcaaagatccccaggacaag

SEQ ID NO: 9201 - DNA, 1518 bp, Artificial Sequence
  Synthetic Polynucleotide
atggccttaccagtgaccgccttgctcctgccgctggccttgctgctccacgccgccaggccgagctacgtgctgacacagcctccatccgtgtctgtggctccaggacagaccgccagaatcacatgcggcggcaacaacctcggcagcaagagcgtgcactggtatcagcagccacctggacaggctccagtggtggtggtgtacgacgacagcgatagacctagcggcatccccgagagattcagcggcagcaattccggcaataccgccacactgaccatcagcagagtggaagctggcgacgaggccgtgtactactgccaagtgtgggacagcagcagcgatcacgtggtgtttggcggcggaacaaagctgacagtgcttggcggaggcggaagtggaggcggaggatctggcggcggaggctctcaactccagctgcaagagtctggccctggcctggtcaagcctagcgaaacactgagcctgacctgtaccgtgtctggcggctctatcagctccggcagctatttctggggctggatcagacaacctcctggcaaaggactggaatggatcggctccatctactacagcggcatcacctactacaaccccaccctgaagtccagagtgaccatctccgtggacaccagcaagaaccagttctccctgaagctgagcagcgtgacagccgccgataccgccgtgtattattgtgccagacatgacggcgctgtggccggcctgtttgattattggggacagggcaccctggtcaccgtgtcatctgctacgcgtggaatgaggactgaggatcttcccaaagctgtcgtctttctcgaaccccaatggtatcgggtgctcgaaaaagactctgtgacactgaaatgccaaggggcctactctcccgaggacaactccacacagtggtttcataatgagtccctcatcagctctcaggccagctcttatttcattgatgccgctacagtggacgactccggcgagtatcggtgtcagaccaatctgtctacactgtctgaccccgtgcagcttgaggtccacattggatggttgctcttgcaagccccacgctgggttttcaaagaggaagatccaatccatctgcggtgccacagctggaaaaacaccgctctccacaaagtcacatacctgcaaaatggcaaaggacgcaaatacttccatcacaattccgatttttacattccgaaggctaccctgaaagacagcggcagctatttctgccggggactcgtcggctccaagaatgtgtcctccgaaaccgtgaatatcacgattacccaaggactggctgtgcctacaatctctagcttctttccgcctggataccaagtctccttctgtcttgtgatggtcctcctgtttgctgtggacacaggactgtacttttccgtgaaaacgaacatccgcagctccacacgcgattggaaagatcacaagtttaaatggcgcaaagatccccaggacaag

SEQ ID NO: 9202 - DNA, 1518 bp, Artificial Sequence; identical to SEQ ID NO: 9153
  Synthetic Polynucleotide

SEQ ID NO: 9203 - DNA, 1518 bp, Artificial Sequence
  Synthetic Polynucleotide
atggccttaccagtgaccgccttgctcctgccgctggccttgctgctccacgccgccaggccgagctacgtgctgacacagcctccatccgtgtctgtggctccaggacagaccgccagaatcacatgcggcggcaacaacatcggcggcaagagcgtgcactggtatcagcagccacctggacaggctccagtggtggtggtgtacgacgacagcgatagacctagcggcatccccgagagattcagcggcagcaattccggcaataccgccacactgaccatcagcagagtggaagctggcgacgaggccgtgtactactgccaagtgtgggacagcagcagcgatcacgtggtgtttggcggcggaacaaagctgacagtgcttggcggaggcggaagtggaggcggaggatctggcggcggaggctctcaactccagctgcaagagtctggccctggcctggtcaagcctagcgaaacactgagcctgacctgtaccgtgtctggcggctctatcagctccggcagctatatctggggctggatcagacaacctcctggcaaaggactggaatggatcggctccatctactacagcggcatcacctactacaaccccagcctgaagtccagagtgaccatctccgtggacaccagcaagaaccagttctccctgaagctgagcagcgtgacagccgccgataccgccgtgtattattgtgccagacatgacggcgctgtggccggcctgtttgattattggggacagggcaccctggtcaccgtgtcatctgctacgcgtggaatgaggactgaggatcttcccaaagctgtcgtctttctcgaaccccaatggtatcgggtgctcgaaaaagactctgtgacactgaaatgccaaggggcctactctcccgaggacaactccacacagtggtttcataatgagtccctcatcagctctcaggccagctcttatttcattgatgccgctacagtggacgactccggcgagtatcggtgtcagaccaatctgtctacactgtctgaccccgtgcagcttgaggtccacattggatggttgctcttgcaagccccacgctgggttttcaaagaggaagatccaatccatctgcggtgccacagctggaaaaacaccgctctccacaaagtcacatacctgcaaaatggcaaaggacgcaaatacttccatcacaattccgatttttacattccgaaggctaccctgaaagacagcggcagctatttctgccggggactcgtcggctccaagaatgtgtcctccgaaaccgtgaatatcacgattacccaaggactggctgtgcctacaatctctagcttctttccgcctggataccaagtctccttctgtcttgtgatggtcctcctgtttgctgtggacacaggactgtacttttccgtgaaaacgaacatccgcagctccacacgcgattggaaagatcacaagtttaaatggcgcaaagatccccaggacaag

SEQ ID NO: 9204 - DNA, 1518 bp, Artificial Sequence
  Synthetic Polynucleotide
atggccttaccagtgaccgccttgctcctgccgctggccttgctgctccacgccgccaggccgagctacgtgctgacacagcctccatccgtgtctgtggctccaggacagaccgccagaatcacatgcggcggcaacaacatcggcggcaagagcgtgcactggtatcagcagccacctggacaggctccagtggtggtggtgtacgacgacagcgatagacctagcggcatccccgagagattcagcggcagcaattccggcaataccgccacactgaccatcagcagagtggaagctggcgacgaggccgtgtactactgccaagtgtgggacagcagcagcgatcacgtggtgtttggcggcggaacaaagctgacagtgcttggcggaggcggaagtggaggcggaggatctggcggcggaggctctcaactccagctgcaagagtctggccctggcctggtcaagcctagcgaaacactgagcctgacctgtaccgtgtctggcggctctatcagctccggcagctatttctggggctggatcagacaacctcctggcaaaggactggaatggatcggctccatctactacagcggcatcacctactacaaccccagcctgaagtccagagtgaccatctccgtggacaccagcaagaaccagttctccctgaagctgagcagcgtgacagccgccgataccgccgtgtattattgtgccagacatgacggcgctatggccggcctgtttgattattggggacagggcaccctggtcaccgtgtcatctgctacgcgtggaatgaggactgaggatcttcccaaagctgtcgtctttctcgaaccccaatggtatcgggtgctcgaaaaagactctgtgacactgaaatgccaaggggcctactctcccgaggacaactccacacagtggtttcataatgagtccctcatcagctctcaggccagctcttatttcattgatgccgctacagtggacgactccggcgagtatcggtgtcagaccaatctgtctacactgtctgaccccgtgcagcttgaggtccacattggatggttgctcttgcaagccccacgctgggttttcaaagaggaagatccaatccatctgcggtgccacagctggaaaaacaccgctctccacaaagtcacatacctgcaaaatggcaaaggacgcaaatacttccatcacaattccgatttttacattccgaaggctaccctgaaagacagcggcagctatttctgccggggactcgtcggctccaagaatgtgtcctccgaaaccgtgaatatcacgattacccaaggactggctgtgcctacaatctctagcttctttccgcctggataccaagtctccttctgtcttgtgatggtcctcctgtttgctgtggacacaggactgtacttttccgtgaaaacgaacatccgcagctccacacgcgattggaaagatcacaagtttaaatggcgcaaagatccccaggacaag

SEQ ID NO: 9205 - DNA, 1518 bp, Artificial Sequence
  Synthetic Polynucleotide
atggccttaccagtgaccgccttgctcctgccgctggccttgctgctccacgccgccaggccgagctacgtgctgacacagcctccatccgtgtctgtggctccaggacagaccgccagaatcacatgcggcggcaacaacatcggcggcaagagcgtgcactggtatcagcagccacctggacaggctccagtggtggtggtgtacgacgacagcgatagacctagcggcatccccgagagattcagcggcagcaattccggcaataccgccacactgaccatcagcagagtggaagctggcgacgaggccgtgtactactgccaagtgtgggacagcagcagcgatcacgtggtgtttggcggcggaacaaagctgacagtgcttggcggaggcggaagtggaggcggaggatctggcggcggaggctctcaactccagctgcaagagtctggccctggcctggtcaagcctagcgaaacactgagcctgacctgtaccgtgtctggcggctctatcagctccggcagctatttctggggctggatcagacaacctcctggcaaaggactggaatggatcggctccatctactacagcggcagcacctactacaaccccagcctgaagtccagagtgaccatctccgtggacaccagcaagaaccagttctccctgaagctgagcagcgtgacagccgccgataccgccgtgtattattgtgccagacatgacggcgctgtggccggcctgtttgattattggggacagggcaccctggtcaccgtgtcatctgctacgcgtggaatgaggactgaggatcttcccaaagctgtcgtctttctcgaaccccaatggtatcgggtgctcgaaaaagactctgtgacactgaaatgccaaggggcctactctcccgaggacaactccacacagtggtttcataatgagtccctcatcagctctcaggccagctcttatttcattgatgccgctacagtggacgactccggcgagtatcggtgtcagaccaatctgtctacactgtctgaccccgtgcagcttgaggtccacattggatggttgctcttgcaagccccacgctgggttttcaaagaggaagatccaatccatctgcggtgccacagctggaaaaacaccgctctccacaaagtcacatacctgcaaaatggcaaaggacgcaaatacttccatcacaattccgatttttacattccgaaggctaccctgaaagacagcggcagctatttctgccggggactcgtcggctccaagaatgtgtcctccgaaaccgtgaatatcacgattacccaaggactggctgtgcctacaatctctagcttctttccgcctggataccaagtctccttctgtcttgtgatggtcctcctgtttgctgtggacacaggactgtacttttccgtgaaaacgaacatccgcagctccacacgcgattggaaagatcacaagtttaaatggcgcaaagatccccaggacaag

SEQ ID NO: 9206 - DNA, 1518 bp, Artificial Sequence
  Synthetic Polynucleotide
atggccttaccagtgaccgccttgctcctgccgctggccttgctgctccacgccgccaggccgagctacgtgctgacacagcctccatccgtgtctgtggctccaggacagaccgccagaatcacatgcggcggcaacaacatcggcggcaagagcgtgcactggtatcagcagccacctggacaggctccagtggtggtggtgtacgacgacagcgatagacctagcggcatccccgagagattcagcggcagcaattccggcaataccgccacactgaccatcagcagagtggaagctggcgacgaggccgtgtactactgccaagtgtgggacagcagcagcgatcacgtggtgtttggcggcggaacaaagctgacagtgcttggcggaggcggaagtggaggcggaggatctggcggcggaggctctcaactccagctgcaagagtctggccctggcctggtcaagcctagcgaaacactgagcctgacctgtaccgtgtctggcggctctatcagctccggcagctatttctggggctggatcagacaacctcctggcaaaggactggaatggatcggctccatctactacagcggcatcagctactacaaccccagcctgaagtccagagtgaccatctccgtggacaccagcaagaaccagttctccctgaagctgagcagcgtgacagccgccgataccgccgtgtattattgtgccagacatgacggcgctgtggccggcctgtttgattattggggacagggcaccctggtcaccgtgtcatctgctacgcgtggaatgaggactgaggatcttcccaaagctgtcgtctttctcgaaccccaatggtatcgggtgctcgaaaaagactctgtgacactgaaatgccaaggggcctactctcccgaggacaactccacacagtggtttcataatgagtccctcatcagctctcaggccagctcttatttcattgatgccgctacagtggacgactccggcgagtatcggtgtcagaccaatctgtctacactgtctgaccccgtgcagcttgaggtccacattggatggttgctcttgcaagccccacgctgggttttcaaagaggaagatccaatccatctgcggtgccacagctggaaaaacaccgctctccacaaagtcacatacctgcaaaatggcaaaggacgcaaatacttccatcacaattccgatttttacattccgaaggctaccctgaaagacagcggcagctatttctgccggggactcgtcggctccaagaatgtgtcctccgaaaccgtgaatatcacgattacccaaggactggctgtgcctacaatctctagcttctttccgcctggataccaagtctccttctgtcttgtgatggtcctcctgtttgctgtggacacaggactgtacttttccgtgaaaacgaacatccgcagctccacacgcgattggaaagatcacaagtttaaatggcgcaaagatccccaggacaag

SEQ ID NO: 9207 - DNA, 1518 bp, Artificial Sequence
  Synthetic Polynucleotide
atggccttaccagtgaccgccttgctcctgccgctggccttgctgctccacgccgccaggccgagctacgtgctgacacagcctccatccgtgtctgtggctccaggacagaccgccagaatcacatgcggcggcaacaacatcggcggcaagagcgtgcactggtatcagcagccacctggacaggctccagtggtggtggtgtacgacgacagcgatagacctagcggcatccccgagagattcagcggcagcaattccggcaataccgccacactgaccatcagcagagtggaagctggcgacgaggccgtgtactactgccaagtgtgggacagcagcagcgatcacgtggtgtttggcggcggaacaaagctgacagtgcttggcggaggcggaagtggaggcggaggatctggcggcggaggctctcaactccagctgcaagagtctggccctggcctggtcaagcctagcgaaacactgagcctgacctgtaccgtgtctggcggctctatcagctccggcagctatttctggggctggatcagacaacctcctggcaaaggactggaatggatcggctccatctactacagcggcatcacctactacaaccccggcctgaagtccagagtgaccatctccgtggacaccagcaagaaccagttctccctgaagctgagcagcgtgacagccgccgataccgccgtgtattattgtgccagacatgacggcgctgtggccggcctgtttgattattggggacagggcaccctggtcaccgtgtcatctgctacgcgtggaatgaggactgaggatcttcccaaagctgtcgtctttctcgaaccccaatggtatcgggtgctcgaaaaagactctgtgacactgaaatgccaaggggcctactctcccgaggacaactccacacagtggtttcataatgagtccctcatcagctctcaggccagctcttatttcattgatgccgctacagtggacgactccggcgagtatcggtgtcagaccaatctgtctacactgtctgaccccgtgcagcttgaggtccacattggatggttgctcttgcaagccccacgctgggttttcaaagaggaagatccaatccatctgcggtgccacagctggaaaaacaccgctctccacaaagtcacatacctgcaaaatggcaaaggacgcaaatacttccatcacaattccgatttttacattccgaaggctaccctgaaagacagcggcagctatttctgccggggactcgtcggctccaagaatgtgtcctccgaaaccgtgaatatcacgattacccaaggactggctgtgcctacaatctctagcttctttccgcctggataccaagtctccttctgtcttgtgatggtcctcctgtttgctgtggacacaggactgtacttttccgtgaaaacgaacatccgcagctccacacgcgattggaaagatcacaagtttaaatggcgcaaagatccccaggacaag

SEQ ID NO: 9208 - DNA, 1518 bp, Artificial Sequence
  Synthetic Polynucleotide
atggccttaccagtgaccgccttgctcctgccgctggccttgctgctccacgccgccaggccgagctacgtgctgacacagcctccatccgtgtctgtggctccaggacagaccgccagaatcacatgcggcggcaacaacatcggcggcaagagcgtgcactggtatcagcagccacctggacaggctccagtggtggtggtgtacgacgacagcgatagacctagcggcatccccgagagattcagcggcagcaattccggcaataccgccacactgaccatcagcagagtggaagctggcgacgaggccgtgtactactgccaagtgtgggacagcagcagcgatcacgtggtgtttggcggcggaacaaagctgacagtgcttggcggaggcggaagtggaggcggaggatctggcggcggaggctctcaactccagctgcaagagtctggccctggcctggtcaagcctagcgaaacactgagcctgacctgtaccgtgtctggcggctctatcagctccggcagctatttctggggctggatcagacaacctcctggcaaaggactggaatggatcggctccatctactacagcggcatcacctactacaaccccaccctgaagtccagagtgaccatctccgtggacaccagcaagaaccagttctccctgaagctgagcagcgtgacagccgccgataccgccgtgtattattgtgccagacatgacggcgctgtggccggcctgtttgattattggggacagggcaccctggtcaccgtgtcatctgctacgcgtggaatgaggactgaggatcttcccaaagctgtcgtctttctcgaaccccaatggtatcgggtgctcgaaaaagactctgtgacactgaaatgccaaggggcctactctcccgaggacaactccacacagtggtttcataatgagtccctcatcagctctcaggccagctcttatttcattgatgccgctacagtggacgactccggcgagtatcggtgtcagaccaatctgtctacactgtctgaccccgtgcagcttgaggtccacattggatggttgctcttgcaagccccacgctgggttttcaaagaggaagatccaatccatctgcggtgccacagctggaaaaacaccgctctccacaaagtcacatacctgcaaaatggcaaaggacgcaaatacttccatcacaattccgatttttacattccgaaggctaccctgaaagacagcggcagctatttctgccggggactcgtcggctccaagaatgtgtcctccgaaaccgtgaatatcacgattacccaaggactggctgtgcctacaatctctagcttctttccgcctggataccaagtctccttctgtcttgtgatggtcctcctgtttgctgtggacacaggactgtacttttccgtgaaaacgaacatccgcagctccacacgcgattggaaagatcacaagtttaaatggcgcaaagatccccaggacaag

SEQ ID NO: 9209 - DNA, 1518 bp, Artificial Sequence; identical to SEQ ID NO: 9188
  Synthetic Polynucleotide

SEQ ID NO: 9210 - DNA, 1518 bp, Artificial Sequence
  Synthetic Polynucleotide
atggccttaccagtgaccgccttgctcctgccgctggccttgctgctccacgccgccaggccgagctacgtgctgacacagcctccatccgtgtctgtggctccaggacagaccgccagaatcacatgcggcggcaacaacatcggcagcaagaccgtgcactggtatcagcagccacctggacaggctccagtggtggtggtgtacgacgacagcgatagacctagcggcatccccgagagattcagcggcagcaattccggcaataccgccacactgaccatcagcagagtggaagctggcgacgaggccgtgtactactgccaagtgtgggacagcagcagcgatcacgtggtgtttggcggcggaacaaagctgacagtgcttggcggaggcggaagtggaggcggaggatctggcggcggaggctctcaactccagctgcaagagtctggccctggcctggtcaagcctagcgaaacactgagcctgacctgtaccgtgtctggcggctctatcagctccggcagctatatctggggctggatcagacaacctcctggcaaaggactggaatggatcggctccatctactacagcggcatcacctactacaaccccagcctgaagtccagagtgaccatctccgtggacaccagcaagaaccagttctccctgaagctgagcagcgtgacagccgccgataccgccgtgtattattgtgccagacatgacggcgctgtggccggcctgtttgattattggggacagggcaccctggtcaccgtgtcatctgctacgcgtggaatgaggactgaggatcttcccaaagctgtcgtctttctcgaaccccaatggtatcgggtgctcgaaaaagactctgtgacactgaaatgccaaggggcctactctcccgaggacaactccacacagtggtttcataatgagtccctcatcagctctcaggccagctcttatttcattgatgccgctacagtggacgactccggcgagtatcggtgtcagaccaatctgtctacactgtctgaccccgtgcagcttgaggtccacattggatggttgctcttgcaagccccacgctgggttttcaaagaggaagatccaatccatctgcggtgccacagctggaaaaacaccgctctccacaaagtcacatacctgcaaaatggcaaaggacgcaaatacttccatcacaattccgatttttacattccgaaggctaccctgaaagacagcggcagctatttctgccggggactcgtcggctccaagaatgtgtcctccgaaaccgtgaatatcacgattacccaaggactggctgtgcctacaatctctagcttctttccgcctggataccaagtctccttctgtcttgtgatggtcctcctgtttgctgtggacacaggactgtacttttccgtgaaaacgaacatccgcagctccacacgcgattggaaagatcacaagtttaaatggcgcaaagatccccaggacaag

SEQ ID NO: 9211 - DNA, 1518 bp, Artificial Sequence
  Synthetic Polynucleotide
atggccttaccagtgaccgccttgctcctgccgctggccttgctgctccacgccgccaggccgagctacgtgctgacacagcctccatccgtgtctgtggctccaggacagaccgccagaatcacatgcggcggcaacaacatcggcagcaagaccgtgcactggtatcagcagccacctggacaggctccagtggtggtggtgtacgacgacagcgatagacctagcggcatccccgagagattcagcggcagcaattccggcaataccgccacactgaccatcagcagagtggaagctggcgacgaggccgtgtactactgccaagtgtgggacagcagcagcgatcacgtggtgtttggcggcggaacaaagctgacagtgcttggcggaggcggaagtggaggcggaggatctggcggcggaggctctcaactccagctgcaagagtctggccctggcctggtcaagcctagcgaaacactgagcctgacctgtaccgtgtctggcggctctatcagctccggcagctatttctggggctggatcagacaacctcctggcaaaggactggaatggatcggctccatctactacagcggcatcacctactacaaccccagcctgaagtccagagtgaccatctccgtggacaccagcaagaaccagttctccctgaagctgagcagcgtgacagccgccgataccgccgtgtattattgtgccagacatgacggcgctatggccggcctgtttgattattggggacagggcaccctggtcaccgtgtcatctgctacgcgtggaatgaggactgaggatcttcccaaagctgtcgtctttctcgaaccccaatggtatcgggtgctcgaaaaagactctgtgacactgaaatgccaaggggcctactctcccgaggacaactccacacagtggtttcataatgagtccctcatcagctctcaggccagctcttatttcattgatgccgctacagtggacgactccggcgagtatcggtgtcagaccaatctgtctacactgtctgaccccgtgcagcttgaggtccacattggatggttgctcttgcaagccccacgctgggttttcaaagaggaagatccaatccatctgcggtgccacagctggaaaaacaccgctctccacaaagtcacatacctgcaaaatggcaaaggacgcaaatacttccatcacaattccgatttttacattccgaaggctaccctgaaagacagcggcagctatttctgccggggactcgtcggctccaagaatgtgtcctccgaaaccgtgaatatcacgattacccaaggactggctgtgcctacaatctctagcttctttccgcctggataccaagtctccttctgtcttgtgatggtcctcctgtttgctgtggacacaggactgtacttttccgtgaaaacgaacatccgcagctccacacgcgattggaaagatcacaagtttaaatggcgcaaagatccccaggacaag

SEQ ID NO: 9212 - DNA, 1518 bp, Artificial Sequence
  Synthetic Polynucleotide
atggccttaccagtgaccgccttgctcctgccgctggccttgctgctccacgccgccaggccgagctacgtgctgacacagcctccatccgtgtctgtggctccaggacagaccgccagaatcacatgcggcggcaacaacatcggcagcaagaccgtgcactggtatcagcagccacctggacaggctccagtggtggtggtgtacgacgacagcgatagacctagcggcatccccgagagattcagcggcagcaattccggcaataccgccacactgaccatcagcagagtggaagctggcgacgaggccgtgtactactgccaagtgtgggacagcagcagcgatcacgtggtgtttggcggcggaacaaagctgacagtgcttggcggaggcggaagtggaggcggaggatctggcggcggaggctctcaactccagctgcaagagtctggccctggcctggtcaagcctagcgaaacactgagcctgacctgtaccgtgtctggcggctctatcagctccggcagctatttctggggctggatcagacaacctcctggcaaaggactggaatggatcggctccatctactacagcggcagcacctactacaaccccagcctgaagtccagagtgaccatctccgtggacaccagcaagaaccagttctccctgaagctgagcagcgtgacagccgccgataccgccgtgtattattgtgccagacatgacggcgctgtggccggcctgtttgattattggggacagggcaccctggtcaccgtgtcatctgctacgcgtggaatgaggactgaggatcttcccaaagctgtcgtctttctcgaaccccaatggtatcgggtgctcgaaaaagactctgtgacactgaaatgccaaggggcctactctcccgaggacaactccacacagtggtttcataatgagtccctcatcagctctcaggccagctcttatttcattgatgccgctacagtggacgactccggcgagtatcggtgtcagaccaatctgtctacactgtctgaccccgtgcagcttgaggtccacattggatggttgctcttgcaagccccacgctgggttttcaaagaggaagatccaatccatctgcggtgccacagctggaaaaacaccgctctccacaaagtcacatacctgcaaaatggcaaaggacgcaaatacttccatcacaattccgatttttacattccgaaggctaccctgaaagacagcggcagctatttctgccggggactcgtcggctccaagaatgtgtcctccgaaaccgtgaatatcacgattacccaaggactggctgtgcctacaatctctagcttctttccgcctggataccaagtctccttctgtcttgtgatggtcctcctgtttgctgtggacacaggactgtacttttccgtgaaaacgaacatccgcagctccacacgcgattggaaagatcacaagtttaaatggcgcaaagatccccaggacaag

SEQ ID NO: 9213 - DNA, 1518 bp, Artificial Sequence
  Synthetic Polynucleotide
atggccttaccagtgaccgccttgctcctgccgctggccttgctgctccacgccgccaggccgagctacgtgctgacacagcctccatccgtgtctgtggctccaggacagaccgccagaatcacatgcggcggcaacaacatcggcagcaagaccgtgcactggtatcagcagccacctggacaggctccagtggtggtggtgtacgacgacagcgatagacctagcggcatccccgagagattcagcggcagcaattccggcaataccgccacactgaccatcagcagagtggaagctggcgacgaggccgtgtactactgccaagtgtgggacagcagcagcgatcacgtggtgtttggcggcggaacaaagctgacagtgcttggcggaggcggaagtggaggcggaggatctggcggcggaggctctcaactccagctgcaagagtctggccctggcctggtcaagcctagcgaaacactgagcctgacctgtaccgtgtctggcggctctatcagctccggcagctatttctggggctggatcagacaacctcctggcaaaggactggaatggatcggctccatctactacagcggcatcagctactacaaccccagcctgaagtccagagtgaccatctccgtggacaccagcaagaaccagttctccctgaagctgagcagcgtgacagccgccgataccgccgtgtattattgtgccagacatgacggcgctgtggccggcctgtttgattattggggacagggcaccctggtcaccgtgtcatctgctacgcgtggaatgaggactgaggatcttcccaaagctgtcgtctttctcgaaccccaatggtatcgggtgctcgaaaaagactctgtgacactgaaatgccaaggggcctactctcccgaggacaactccacacagtggtttcataatgagtccctcatcagctctcaggccagctcttatttcattgatgccgctacagtggacgactccggcgagtatcggtgtcagaccaatctgtctacactgtctgaccccgtgcagcttgaggtccacattggatggttgctcttgcaagccccacgctgggttttcaaagaggaagatccaatccatctgcggtgccacagctggaaaaacaccgctctccacaaagtcacatacctgcaaaatggcaaaggacgcaaatacttccatcacaattccgatttttacattccgaaggctaccctgaaagacagcggcagctatttctgccggggactcgtcggctccaagaatgtgtcctccgaaaccgtgaatatcacgattacccaaggactggctgtgcctacaatctctagcttctttccgcctggataccaagtctccttctgtcttgtgatggtcctcctgtttgctgtggacacaggactgtacttttccgtgaaaacgaacatccgcagctccacacgcgattggaaagatcacaagtttaaatggcgcaaagatccccaggacaag

SEQ ID NO: 9214 - DNA, 1518 bp, Artificial Sequence
  Synthetic Polynucleotide
atggccttaccagtgaccgccttgctcctgccgctggccttgctgctccacgccgccaggccgagctacgtgctgacacagcctccatccgtgtctgtggctccaggacagaccgccagaatcacatgcggcggcaacaacatcggcagcaagaccgtgcactggtatcagcagccacctggacaggctccagtggtggtggtgtacgacgacagcgatagacctagcggcatccccgagagattcagcggcagcaattccggcaataccgccacactgaccatcagcagagtggaagctggcgacgaggccgtgtactactgccaagtgtgggacagcagcagcgatcacgtggtgtttggcggcggaacaaagctgacagtgcttggcggaggcggaagtggaggcggaggatctggcggcggaggctctcaactccagctgcaagagtctggccctggcctggtcaagcctagcgaaacactgagcctgacctgtaccgtgtctggcggctctatcagctccggcagctatttctggggctggatcagacaacctcctggcaaaggactggaatggatcggctccatctactacagcggcatcacctactacaaccccggcctgaagtccagagtgaccatctccgtggacaccagcaagaaccagttctccctgaagctgagcagcgtgacagccgccgataccgccgtgtattattgtgccagacatgacggcgctgtggccggcctgtttgattattggggacagggcaccctggtcaccgtgtcatctgctacgcgtggaatgaggactgaggatcttcccaaagctgtcgtctttctcgaaccccaatggtatcgggtgctcgaaaaagactctgtgacactgaaatgccaaggggcctactctcccgaggacaactccacacagtggtttcataatgagtccctcatcagctctcaggccagctcttatttcattgatgccgctacagtggacgactccggcgagtatcggtgtcagaccaatctgtctacactgtctgaccccgtgcagcttgaggtccacattggatggttgctcttgcaagccccacgctgggttttcaaagaggaagatccaatccatctgcggtgccacagctggaaaaacaccgctctccacaaagtcacatacctgcaaaatggcaaaggacgcaaatacttccatcacaattccgatttttacattccgaaggctaccctgaaagacagcggcagctatttctgccggggactcgtcggctccaagaatgtgtcctccgaaaccgtgaatatcacgattacccaaggactggctgtgcctacaatctctagcttctttccgcctggataccaagtctccttctgtcttgtgatggtcctcctgtttgctgtggacacaggactgtacttttccgtgaaaacgaacatccgcagctccacacgcgattggaaagatcacaagtttaaatggcgcaaagatccccaggacaag

SEQ ID NO: 9215 - DNA, 1518 bp, Artificial Sequence
  Synthetic Polynucleotide
atggccttaccagtgaccgccttgctcctgccgctggccttgctgctccacgccgccaggccgagctacgtgctgacacagcctccatccgtgtctgtggctccaggacagaccgccagaatcacatgcggcggcaacaacatcggcagcaagaccgtgcactggtatcagcagccacctggacaggctccagtggtggtggtgtacgacgacagcgatagacctagcggcatccccgagagattcagcggcagcaattccggcaataccgccacactgaccatcagcagagtggaagctggcgacgaggccgtgtactactgccaagtgtgggacagcagcagcgatcacgtggtgtttggcggcggaacaaagctgacagtgcttggcggaggcggaagtggaggcggaggatctggcggcggaggctctcaactccagctgcaagagtctggccctggcctggtcaagcctagcgaaacactgagcctgacctgtaccgtgtctggcggctctatcagctccggcagctatttctggggctggatcagacaacctcctggcaaaggactggaatggatcggctccatctactacagcggcatcacctactacaaccccaccctgaagtccagagtgaccatctccgtggacaccagcaagaaccagttctccctgaagctgagcagcgtgacagccgccgataccgccgtgtattattgtgccagacatgacggcgctgtggccggcctgtttgattattggggacagggcaccctggtcaccgtgtcatctgctacgcgtggaatgaggactgaggatcttcccaaagctgtcgtctttctcgaaccccaatggtatcgggtgctcgaaaaagactctgtgacactgaaatgccaaggggcctactctcccgaggacaactccacacagtggtttcataatgagtccctcatcagctctcaggccagctcttatttcattgatgccgctacagtggacgactccggcgagtatcggtgtcagaccaatctgtctacactgtctgaccccgtgcagcttgaggtccacattggatggttgctcttgcaagccccacgctgggttttcaaagaggaagatccaatccatctgcggtgccacagctggaaaaacaccgctctccacaaagtcacatacctgcaaaatggcaaaggacgcaaatacttccatcacaattccgatttttacattccgaaggctaccctgaaagacagcggcagctatttctgccggggactcgtcggctccaagaatgtgtcctccgaaaccgtgaatatcacgattacccaaggactggctgtgcctacaatctctagcttctttccgcctggataccaagtctccttctgtcttgtgatggtcctcctgtttgctgtggacacaggactgtacttttccgtgaaaacgaacatccgcagctccacacgcgattggaaagatcacaagtttaaatggcgcaaagatccccaggacaag

SEQ ID NO: 9216 - DNA, 1497 bp, Artificial Sequence; identical to SEQ ID NO: 9174
  Synthetic Polynucleotide

SEQ ID NO: 9217 - DNA, 1497 bp, Artificial Sequence
  Synthetic Polynucleotide
atggccttaccagtgaccgccttgctcctgccgctggccttgctgctccacgccgccaggccggacatccagatgacacagagccctagcagcctgtctgccagcgtgggagacagagtgaccatcacatgcaaggccagccaggatgtgggcacagccgtggattggtatcagcagaagcctggcaaggcccctaagctgctgatctactgggccagcacaagacacacaggcgtgcccagcagattttctggcagcggctctggcaccgacttcaccctgacaatatccagcctccagcctgaggacttcgccacctactactgccagcagtacaacagctaccctctgaccttcggccagggcaccaaggtggaaatcaaaagaggcggaggcggaagtggaggcggaggatctggcggcggaggctctcaagttcagctggttcagagcggagccgaagtgaagaaacctggcgagagcgtgaaggtgtcctgcaaagccagcggctacacctttaccgagtacaccatccactgggtccgacaggctccaggacaaggactggaatggatgggcaacatcaaccccaacaacggcggcaccacctacaaccagaaattcgaggatcgcgtgacaatcaccgccgacaagagcaccagcaccgcctacatggaactgagcagcctgagaagcgaggacaccgccgtgtactattgtgccagaggctggaacttcgactactggggccagggaaccaccgtgacagtctcttctacgcgtggaatgaggactgaggatcttcccaaagctgtcgtctttctcgaaccccaatggtatcgggtgctcgaaaaagactctgtgacactgaaatgccaaggggcctactctcccgaggacaactccacacagtggtttcataatgagtccctcatcagctctcaggccagctcttatttcattgatgccgctacagtggacgactccggcgagtatcggtgtcagaccaatctgtctacactgtctgaccccgtgcagcttgaggtccacattggatggttgctcttgcaagccccacgctgggttttcaaagaggaagatccaatccatctgcggtgccacagctggaaaaacaccgctctccacaaagtcacatacctgcaaaatggcaaaggacgcaaatacttccatcacaattccgatttttacattccgaaggctaccctgaaagacagcggcagctatttctgccggggactcgtcggctccaagaatgtgtcctccgaaaccgtgaatatcacgattacccaaggactggctgtgcctacaatctctagcttctttccgcctggataccaagtctccttctgtcttgtgatggtcctcctgtttgctgtggacacaggactgtacttttccgtgaaaacgaacatccgcagctccacacgcgattggaaagatcacaagtttaaatggcgcaaagatccccaggacaag

SEQ ID NO: 9218 - DNA, 1497 bp, Artificial Sequence; identical to SEQ ID NO: 9173
  Synthetic Polynucleotide

SEQ ID NO: 9219 - DNA, 1497 bp, Artificial Sequence
  Synthetic Polynucleotide
atggccttaccagtgaccgccttgctcctgccgctggccttgctgctccacgccgccaggccggacatcgtgatgacccagagccacaagttcatgagcaccagcgtgggcgacagagtgtccatcatctgcaaggccagccaggatgtgggcacagccgtggattggtatcagcagaagcctggacagagccccaagctgctgatctactgggccagcacaagacacaccggcgtgcccgatagattcacaggctctggcagcggcaccgatttcaccctggccatcacaaacgtgcagagcgaggacctggccgactacttctgccagcagtacaacagctaccctctgacctttggagccggcaccaagctggaaatcaagagaggcggaggcggaagtggaggcggaggatctggcggcggaggctctcaagttcagctggttcagagcggagccgaagtgaagaaacctggcgagagcgtgaaggtgtcctgcaaagccagcggctacacctttaccgagtacaccatccactgggtccgacaggctccaggacaaggactggaatggatgggcaacatcaaccccaacaacggcggcaccacctacaaccagaaattcgaggatcgcgtgacaatcaccgccgacaagagcaccagcaccgcctacatggaactgagcagcctgagaagcgaggacaccgccgtgtactattgtgccagaggctggaacttcgactactggggccagggaaccaccgtgacagtctcttctacgcgtggaatgaggactgaggatcttcccaaagctgtcgtctttctcgaaccccaatggtatcgggtgctcgaaaaagactctgtgacactgaaatgccaaggggcctactctcccgaggacaactccacacagtggtttcataatgagtccctcatcagctctcaggccagctcttatttcattgatgccgctacagtggacgactccggcgagtatcggtgtcagaccaatctgtctacactgtctgaccccgtgcagcttgaggtccacattggatggttgctcttgcaagccccacgctgggttttcaaagaggaagatccaatccatctgcggtgccacagctggaaaaacaccgctctccacaaagtcacatacctgcaaaatggcaaaggacgcaaatacttccatcacaattccgatttttacattccgaaggctaccctgaaagacagcggcagctatttctgccggggactcgtcggctccaagaatgtgtcctccgaaaccgtgaatatcacgattacccaaggactggctgtgcctacaatctctagcttctttccgcctggataccaagtctccttctgtcttgtgatggtcctcctgtttgctgtggacacaggactgtacttttccgtgaaaacgaacatccgcagctccacacgcgattggaaagatcacaagtttaaatggcgcaaagatccccaggacaag

SEQ ID NO: 9220 - DNA, 1503 bp, Artificial Sequence
  Synthetic Polynucleotide
atggccttaccagtgaccgccttgctcctgccgctggccttgctgctccacgccgccaggccggacatccagatgacacagagccctagcagcctgtctgccagcgtgggagacagagtgaccatcacatgcaaggccagccaggatgtgggcacagccgtggattggtatcagcagaagcctggcaaggcccctaagctgctgatctcttgggccagcacaagacacacaggcgtgcccagcagattttctggcagcggctctggcaccgacttcaccctgacaatatccagcctccagcctgaggacttcgccacctacttttgccagcagtacaacagctaccctctgaccttcggccagggcaccaaggtggaaatcaagagaacagttggcggaggcggaagtggaggcggaggatctggcggcggaggctctgaagtgcagctggttgaatcaggtggcggcctggttcaacctggcggatctctgagactgagctgtgccgccagcggctacacctttaccgagtacacaatccactgggtccgacaggcccctggcaaaggacttgagtgggtcgccaacatcaaccccaacaatggcggcaccacctacaaccagaagttcgaggacagattcaccatcagccgggacaacagcaagaacaccctgtacctccagatgaactccctgagagccgaggacaccgccgtgtactattgtgccagaggctggaacttcgactactggggccagggaacactggtcaccgttagctctacgcgtggaatgaggactgaggatcttcccaaagctgtcgtctttctcgaaccccaatggtatcgggtgctcgaaaaagactctgtgacactgaaatgccaaggggcctactctcccgaggacaactccacacagtggtttcataatgagtccctcatcagctctcaggccagctcttatttcattgatgccgctacagtggacgactccggcgagtatcggtgtcagaccaatctgtctacactgtctgaccccgtgcagcttgaggtccacattggatggttgctcttgcaagccccacgctgggttttcaaagaggaagatccaatccatctgcggtgccacagctggaaaaacaccgctctccacaaagtcacatacctgcaaaatggcaaaggacgcaaatacttccatcacaattccgatttttacattccgaaggctaccctgaaagacagcggcagctatttctgccggggactcgtcggctccaagaatgtgtcctccgaaaccgtgaatatcacgattacccaaggactggctgtgcctacaatctctagcttctttccgcctggataccaagtctccttctgtcttgtgatggtcctcctgtttgctgtggacacaggactgtacttttccgtgaaaacgaacatccgcagctccacacgcgattggaaagatcacaagtttaaatggcgcaaagatccccaggacaag

SEQ ID NO: 9221 - DNA, 1503 bp, Artificial Sequence
  Synthetic Polynucleotide
atggccttaccagtgaccgccttgctcctgccgctggccttgctgctccacgccgccaggccggacatccagatgacacagagccctagcagcctgtctgccagcgtgggagacagagtgaccatcacatgcaaggccagccaggatgtgggcacagccgtggattggtatcagcagaagcctggcaaggcccctaagctgctgatctcttgggccagcacaagacacacaggcgtgcccagcagattttctggcagcggctctggcaccgacttcaccctgacaatatccagcctccagcctgaggacttcgccacctacttttgccagcagtacaacagctaccctctgaccttcggccagggcaccaaggtggaaatcaagagaacagttggcggaggcggaagtggaggcggaggatctggcggcggaggctctgaagttcagctgcaacagtctggccccgagctggttaagcctggaacaagcgtgcggatctcctgcaagaccagcggctacaccttcaccgagtacaccatccactgggtcaagcagagccacggcaagagcctggaatggatcggcaacatcaaccccaacaacggcggcaccacctacaaccagaagttcgaggacaaggccacactgaccgtggacaagagcagcagcaccgcctacatggaactgagaagcctgaccagcgaggacagcgccgtgtactattgtgccgccggatggaacttcgactactggggccagggaacaaccctgaccgttagctctacgcgtggaatgaggactgaggatcttcccaaagctgtcgtctttctcgaaccccaatggtatcgggtgctcgaaaaagactctgtgacactgaaatgccaaggggcctactctcccgaggacaactccacacagtggtttcataatgagtccctcatcagctctcaggccagctcttatttcattgatgccgctacagtggacgactccggcgagtatcggtgtcagaccaatctgtctacactgtctgaccccgtgcagcttgaggtccacattggatggttgctcttgcaagccccacgctgggttttcaaagaggaagatccaatccatctgcggtgccacagctggaaaaacaccgctctccacaaagtcacatacctgcaaaatggcaaaggacgcaaatacttccatcacaattccgatttttacattccgaaggctaccctgaaagacagcggcagctatttctgccggggactcgtcggctccaagaatgtgtcctccgaaaccgtgaatatcacgattacccaaggactggctgtgcctacaatctctagcttctttccgcctggataccaagtctccttctgtcttgtgatggtcctcctgtttgctgtggacacaggactgtacttttccgtgaaaacgaacatccgcagctccacacgcgattggaaagatcacaagtttaaatggcgcaaagatccccaggacaag

SEQ ID NO: 9222 - DNA, 1503 bp, Artificial Sequence; identical to SEQ ID NO: 9175
  Synthetic Polynucleotide

SEQ ID NO: 9223 - DNA, 1515 bp, Artificial Sequence; identical to SEQ ID NO: 9182
  Synthetic Polynucleotide

SEQ ID NO: 9224 - DNA, 1512 bp, Artificial Sequence
  Synthetic Polynucleotide
atggccttaccagtgaccgccttgctcctgccgctggccttgctgctccacgccgccaggccggacattcagatgacacagagccctagcagcctgagcgcctctgtgggagacagagtgaccatcacatgcaagagcagccagagcctgctgtactccagcaatcagaagaactacctggcctggttccagcagaagcctggcaaggctcctaagctgctgatctactgggccagcaccagagaaagcggcgtgccaagcagattttctggcagcggctctggcaccgacttcaccctgacaatatccagcctccagcctgaggacttcgccacctacttttgccaccagtacctgagcagctacacattcggacagggcaccaaggtggaaatcaagcggggcggaggcggaagtggaggcggaggatctggcggcggaggctctgaggtgcagctggttgaatctggcggaggactggttcagcctggcggatctctgagactgtcttgtgccgccagcggcttcaccttcaccacctattggatgcactgggtccgacaggcccctggcaaaggacttgagtgggtcggatatatcaggcccagcaccggctacacagagtacaaccagaagttcaaggaccgcttcaccatcagcgccgacaccagcaagaataccgcctacctccagatgaacagcctgagagccgaggacaccgccgtgtactactgtgccagatccagatggctgctggactattggggccagggcacactggttacagtttctacgcgtggaatgaggactgaggatcttcccaaagctgtcgtctttctcgaaccccaatggtatcgggtgctcgaaaaagactctgtgacactgaaatgccaaggggcctactctcccgaggacaactccacacagtggtttcataatgagtccctcatcagctctcaggccagctcttatttcattgatgccgctacagtggacgactccggcgagtatcggtgtcagaccaatctgtctacactgtctgaccccgtgcagcttgaggtccacattggatggttgctcttgcaagccccacgctgggttttcaaagaggaagatccaatccatctgcggtgccacagctggaaaaacaccgctctccacaaagtcacatacctgcaaaatggcaaaggacgcaaatacttccatcacaattccgatttttacattccgaaggctaccctgaaagacagcggcagctatttctgccggggactcgtcggctccaagaatgtgtcctccgaaaccgtgaatatcacgattacccaaggactggctgtgcctacaatctctagcttctttccgcctggataccaagtctccttctgtcttgtgatggtcctcctgtttgctgtggacacaggactgtacttttccgtgaaaacgaacatccgcagctccacacgcgattggaaagatcacaagtttaaatggcgcaaagatccccaggacaag

SEQ ID NO: 9225 - DNA, 1506 bp, Artificial Sequence
  Synthetic Polynucleotide
atggccttaccagtgaccgccttgctcctgccgctggccttgctgctccacgccgccaggccggacattcagatgacacagagccctagcagcctgagcgcctctgtgggagacagagtgaccatcacatgcaagagcagccagagcctgctgtactccagcaatcagaagaactacctggcctggttccagcagaagcctggcaaggctcctaagctgctgatctactgggccagcaccagagaaagcggcgtgccaagcagattttctggcagcggctctggcaccgacttcaccctgacaatatccagcctccagcctgaggacttcgccacctacttttgccaccagtacctgagcagctacacattcggacagggcaccaaggtggaaatcaagcggggcggaggcggaagtggaggcggaggatctggcggcggaggctctgacattcagatgacacagagccctagcagcctgagcgcctctgtgggagacagagtgaccatcacatgcaagagcagccagagcctgctgtactccagcaatcagaagaactacctggcctggttccagcagaagcctggcaaggctcctaagctgctgatctactgggccagcaccagagaaagcggcgtgccaagcagattttctggcagcggctctggcaccgacttcaccctgacaatatccagcctccagcctgaggacttcgccacctacttttgccaccagtacctgagcagctacacattcggacagggcaccaaggtggaaatcaagcggacgcgtggaatgaggactgaggatcttcccaaagctgtcgtctttctcgaaccccaatggtatcgggtgctcgaaaaagactctgtgacactgaaatgccaaggggcctactctcccgaggacaactccacacagtggtttcataatgagtccctcatcagctctcaggccagctcttatttcattgatgccgctacagtggacgactccggcgagtatcggtgtcagaccaatctgtctacactgtctgaccccgtgcagcttgaggtccacattggatggttgctcttgcaagccccacgctgggttttcaaagaggaagatccaatccatctgcggtgccacagctggaaaaacaccgctctccacaaagtcacatacctgcaaaatggcaaaggacgcaaatacttccatcacaattccgatttttacattccgaaggctaccctgaaagacagcggcagctatttctgccggggactcgtcggctccaagaatgtgtcctccgaaaccgtgaatatcacgattacccaaggactggctgtgcctacaatctctagcttctttccgcctggataccaagtctccttctgtcttgtgatggtcctcctgtttgctgtggacacaggactgtacttttccgtgaaaacgaacatccgcagctccacacgcgattggaaagatcacaagtttaaatggcgcaaagatccccaggacaag

SEQ ID NO: 9226 - DNA, 1503 bp, Artificial Sequence; identical to SEQ ID NO: 9185
  Synthetic Polynucleotide

SEQ ID NO: 9227 - DNA, 1503 bp, Artificial Sequence; identical to SEQ ID NO: 4999
  Synthetic Polynucleotide

SEQ ID NO: 9228 - DNA, 1503 bp, Artificial Sequence
  Synthetic Polynucleotide
atggccttaccagtgaccgccttgctcctgccgctggccttgctgctccacgccgccaggccggacatccagatgacacagagccctagcagcctgtctgccagcgtgggagacagagtgaccatcacctgtagagccagccaggacatcagcagctacctgaactggtatcagcagaagcccggcaaggcccctaagctgctgatctactacaccagcagactgcacagcggcgtgcccagcagattttctggctctggcagcggcaccgacttcaccctgacaatatctagcctccagcctgaggacttcgccacctactattgccagcagggcaacaccctgccttacacatttggacagggcaccaaggtggaaatcaagagaggcggaggcggaagtggaggcggaggatctggcggcggaggctctgaagtgcagctggttgaatcaggtggcggcctggttcaacctggcggatctctgagactgagctgtgccgccagcggctacaccttcagcgactactttatgagctgggtccgacaggcccctggcaaaggacttgaatgggtcgccaccatcagcaatggcggcacctacacttactaccccgacagcgtgaagggcagattcaccatctccagagacaacagcaagaacaccctgtacctccagatgaactccctgagagccgaggacaccgccgtgtactactgcgccagattcgacggctacatcttcgactattggggccagggcaccctggtcacagtctcttctacgcgtggaatgaggactgaggatcttcccaaagctgtcgtctttctcgaaccccaatggtatcgggtgctcgaaaaagactctgtgacactgaaatgccaaggggcctactctcccgaggacaactccacacagtggtttcataatgagtccctcatcagctctcaggccagctcttatttcattgatgccgctacagtggacgactccggcgagtatcggtgtcagaccaatctgtctacactgtctgaccccgtgcagcttgaggtccacattggatggttgctcttgcaagccccacgctgggttttcaaagaggaagatccaatccatctgcggtgccacagctggaaaaacaccgctctccacaaagtcacatacctgcaaaatggcaaaggacgcaaatacttccatcacaattccgatttttacattccgaaggctaccctgaaagacagcggcagctatttctgccggggactcgtcggctccaagaatgtgtcctccgaaaccgtgaatatcacgattacccaaggactggctgtgcctacaatctctagcttctttccgcctggataccaagtctccttctgtcttgtgatggtcctcctgtttgctgtggacacaggactgtacttttccgtgaaaacgaacatccgcagctccacacgcgattggaaagatcacaagtttaaatggcgcaaagatccccaggacaag

SEQ ID NO: 9229 - DNA, 1503 bp, Artificial Sequence; identical to SEQ ID NO: 9186
  Synthetic Polynucleotide

SEQ ID NO: 9230 - DNA, 1503 bp, Artificial Sequence
  Synthetic Polynucleotide
atggccttaccagtgaccgccttgctcctgccgctggccttgctgctccacgccgccaggccggacatccagatgacacagagccctagcagcctgtctgccagcgtgggagacagagtgaccatcacctgtagagccagccaggacatcagcaactacctgaactggtatcagcagaagcccggcaaggcccctaagctgctgatctactacaccagcagactgcacagcggcgtgcccagcagattttctggctctggcagcggcaccgacttcaccctgacaatatctagcctccagcctgaggacttcgccacctactattgccagcagggcaacaccctgccttggacatttggacagggcaccaaggtggaaatcaagagaggcggaggcggaagtggaggcggaggatctggcggcggaggctctgaagtgcagctggttgaatcaggtggcggcctggttcaacctggcggatctctgagactgagctgtgccgccagcggctacaccttcagcgactactttatgagctgggtccgacaggcccctggcaaaggacttgaatgggtcgccaccatcagcaatggcggcacctacacttactaccccgacagcgtgaagggcagattcaccatctccagagacaacagcaagaacaccctgtacctccagatgaactccctgagagccgaggacaccgccgtgtactactgcgccagattcgacggctacatcttcgactattggggccagggcaccctggtcacagtctcttctacgcgtggaatgaggactgaggatcttcccaaagctgtcgtctttctcgaaccccaatggtatcgggtgctcgaaaaagactctgtgacactgaaatgccaaggggcctactctcccgaggacaactccacacagtggtttcataatgagtccctcatcagctctcaggccagctcttatttcattgatgccgctacagtggacgactccggcgagtatcggtgtcagaccaatctgtctacactgtctgaccccgtgcagcttgaggtccacattggatggttgctcttgcaagccccacgctgggttttcaaagaggaagatccaatccatctgcggtgccacagctggaaaaacaccgctctccacaaagtcacatacctgcaaaatggcaaaggacgcaaatacttccatcacaattccgatttttacattccgaaggctaccctgaaagacagcggcagctatttctgccggggactcgtcggctccaagaatgtgtcctccgaaaccgtgaatatcacgattacccaaggactggctgtgcctacaatctctagcttctttccgcctggataccaagtctccttctgtcttgtgatggtcctcctgtttgctgtggacacaggactgtacttttccgtgaaaacgaacatccgcagctccacacgcgattggaaagatcacaagtttaaatggcgcaaagatccccaggacaag

SEQ ID NO: 9231 - DNA, 1503 bp, Artificial Sequence; identical to SEQ ID NO: 9187
  Synthetic Polynucleotide

SEQ ID NO: 9232 - DNA, 2004 bp, Artificial Sequence
  Synthetic Polynucleotide
atggccttaccagtgaccgccttgctcctgccgctggccttgctgctccacgccgccaggccggcatgcgaagtgcagctgcttgaaagtggcggcggactgattcagcctggcggatctctgagactgagctgtgccgccagcggcttcaccttttctagccacgccatgacctgggtccgacaggcacctggaaaagggcttgaatgggtgtccgccatcagcggctctggcgattacacacactacgccgacagcgtgaagggcagattcaccatcagcagagacaacagcaagaacaccgtgtacctccagatgaacagcctgagagccgaggacagcgccgtgtattattgcgccaaggatgaggatggcggcagcctgcttggacacagaggacaaggcaccctggtcaccgtttcttccggtaccggcggaggcggatctggcggcggaggtagcggtggcggaggatctgaattcatcaacatctacaacgccgagcctgccaatcctagcgagaagaacagccccgaattcgacatcgtgatgacacagagccccgccacactgtcactgtctccaggcgaaagagccacactgagctgtcggagcagcaagagcctccagaacgtgaacggcaacacctacctgtactggttccagcagaagcccggccagtctcctcagctcctgatctacagaatgagcaacctgaacagcggcgtgcccgacagattttctggcagcggaagcggcaccgagttcaccctgaccataagcagcctggaacctgaggacttcgccgtgtactactgtatgcagcacctggaataccccatcaccttcggagccggcaccaagctggaaatcaaaggcggaggcggaagtggaggcggaggatctggcggcggaggctctgaagtgcaactggttgaatctggcggcggactggttaagcctggcggatctctgaagctgagctgtgccgccagcggctacacctttaccagctacgtgatgcactgggtccgacaggcccctggcaaaggacttgagtggatcggctacatcaacccctacaacgatggcaccaagtacaacgagaagttccagggcagagtgaccatcagctccgacaagagcatcagcaccgcctacatggaactgagcagcctgagaagcgaggataccgccatgtactattgcgccagaggcacctactactacggcaccagagtgttcgactactggggccagggaaccctggtcacagtctcttctacgcgtggaatgaggactgaggatcttcccaaagctgtcgtctttctcgaaccccaatggtatcgggtgctcgaaaaagactctgtgacactgaaatgccaaggggcctactctcccgaggacaactccacacagtggtttcataatgagtccctcatcagctctcaggccagctcttatttcattgatgccgctacagtggacgactccggcgagtatcggtgtcagaccaatctgtctacactgtctgaccccgtgcagcttgaggtccacattggatggttgctcttgcaagccccacgctgggttttcaaagaggaagatccaatccatctgcggtgccacagctggaaaaacaccgctctccacaaagtcacatacctgcaaaatggcaaaggacgcaaatacttccatcacaattccgatttttacattccgaaggctaccctgaaagacagcggcagctatttctgccggggactcgtcggctccaagaatgtgtcctccgaaaccgtgaatatcacgattacccaaggactggctgtgcctacaatctctagcttctttccgcctggataccaagtctccttctgtcttgtgatggtcctcctgtttgctgtggacacaggactgtacttttccgtgaaaacgaacatccgcagctccacacgcgattggaaagatcacaagtttaaatggcgcaaagatccccaggacaag

SEQ ID NO: 9233 - DNA, 1926 bp, Artificial Sequence
  Synthetic Polynucleotide
atggccttaccagtgaccgccttgctcctgccgctggccttgctgctccacgccgccaggccggaagtgcagctggttgaatctggcggaggactggttcaggctggcggatctctgagactgtcttgtgccgccagcggcagaacctttagcatgggctggtttagacaggcccctggcaaagagagagagttcgtcgccgccatcacatactctggcggcagcccttactacgccgactctgtgaagggcagattcaccatcagccgggacaacgccaagaacaccgtgtacctccagatgaacagcctgaagcctgaggacaccgccgtgtactactgcgccgccaatccaacatacggcagcgactggaacgccgagaattggggccagggaacccaagtgacagtgtctagcggatccggcggcggaggatctggcggaggcggatctgggggcggaggctctttcgaagacatccagatgacacagagccctagcagcctgtctgccagcgtgggagacagagtgaccatcacatgcaaggccagcgaccacatcaacaactggctggcctggtatcagcagaagcctggacaggcccctaagctgctgatctacggcgctaccacactggaaacaggcgtgcccagcagattttctggcagcggctctggcaccgactacaccctgacaatatccagcctccagcctgaggacttcgccacctactactgtcagcagagctggaacaccccttggacattcggccagggcaccaagctggaaatcaagagaggcggaggcggaagtggaggcggaggatctggcggcggaggctctcaagttcagcttcaacagcctggcgctgagctggtcaaacctggcgcttctgtgaagatgagctgcaaagccagcggctacgccttcagcagctactggatcaactggatgaagcagaaacccggccagggactcgaatggatcggccaaatctatcccggcgacggcgacaccaactacaacggcaagttcaagggcagagccacactgaccgccgatacctctagcagcacagcctacatgcagctgagcagcctgaccagcgaagatagcgccgtgtacttctgtgcccggtccatcacaacagtcgtgggctgcgctatggactattggggccagggaacaagcgtgaccgtgtctagtacgcgtggaatgaggactgaggatcttcccaaagctgtcgtctttctcgaaccccaatggtatcgggtgctcgaaaaagactctgtgacactgaaatgccaaggggcctactctcccgaggacaactccacacagtggtttcataatgagtccctcatcagctctcaggccagctcttatttcattgatgccgctacagtggacgactccggcgagtatcggtgtcagaccaatctgtctacactgtctgaccccgtgcagcttgaggtccacattggatggttgctcttgcaagccccacgctgggttttcaaagaggaagatccaatccatctgcggtgccacagctggaaaaacaccgctctccacaaagtcacatacctgcaaaatggcaaaggacgcaaatacttccatcacaattccgatttttacattccgaaggctaccctgaaagacagcggcagctatttctgccggggactcgtcggctccaagaatgtgtcctccgaaaccgtgaatatcacgattacccaaggactggctgtgcctacaatctctagcttctttccgcctggataccaagtctccttctgtcttgtgatggtcctcctgtttgctgtggacacaggactgtacttttccgtgaaaacgaacatccgcagctccacacgcgattggaaagatcacaagtttaaatggcgcaaagatccccaggacaag

SEQ ID NO: 9234 - DNA, 1929 bp, Artificial Sequence
  Synthetic Polynucleotide
atggccttaccagtgaccgccttgctcctgccgctggccttgctgctccacgccgccaggccggaagtgcagctgcttgaaagtggcggcggactgattcagcctggcggatctctgagactgagctgtgccgccagcggcttcaccttttctagccacgccatgacctgggtccgacaggcacctggaaaagggcttgaatgggtgtccgccatcagcggctctggcgattacacacactacgccgacagcgtgaagggcagattcaccatcagcagagacaacagcaagaacaccgtgtacctccagatgaacagcctgagagccgaggacagcgccgtgtattattgcgccaaggatgaggatggcggcagcctgcttggacacagaggacaaggcaccctggtcaccgtttcttccggatccggcggcggaggatctggcggaggcggatctgggggcggaggctctttcgaagacatccagatgacacagagccctagcagcctgtctgccagcgtgggagacagagtgaccatcacatgcaaggccagcgaccacatcaacaactggctggcctggtatcagcagaagcctggacaggcccctaagctgctgatctacggcgctaccacactggaaacaggcgtgcccagcagattttctggcagcggctctggcaccgactacaccctgacaatatccagcctccagcctgaggacttcgccacctactactgtcagcagagctggaacaccccttggacattcggccagggcaccaagctggaaatcaagagaggcggaggcggaagtggaggcggaggatctggcggcggaggctctcaagttcagcttcaacagcctggcgctgagctggtcaaacctggcgcttctgtgaagatgagctgcaaagccagcggctacgccttcagcagctactggatcaactggatgaagcagaaacccggccagggactcgaatggatcggccaaatctatcccggcgacggcgacaccaactacaacggcaagttcaagggcagagccacactgaccgccgatacctctagcagcacagcctacatgcagctgagcagcctgaccagcgaagatagcgccgtgtacttctgtgcccggtccatcacaacagtcgtgggctgcgctatggactattggggccagggaacaagcgtgaccgtgtctagtacgcgtggaatgaggactgaggatcttcccaaagctgtcgtctttctcgaaccccaatggtatcgggtgctcgaaaaagactctgtgacactgaaatgccaaggggcctactctcccgaggacaactccacacagtggtttcataatgagtccctcatcagctctcaggccagctcttatttcattgatgccgctacagtggacgactccggcgagtatcggtgtcagaccaatctgtctacactgtctgaccccgtgcagcttgaggtccacattggatggttgctcttgcaagccccacgctgggttttcaaagaggaagatccaatccatctgcggtgccacagctggaaaaacaccgctctccacaaagtcacatacctgcaaaatggcaaaggacgcaaatacttccatcacaattccgatttttacattccgaaggctaccctgaaagacagcggcagctatttctgccggggactcgtcggctccaagaatgtgtcctccgaaaccgtgaatatcacgattacccaaggactggctgtgcctacaatctctagcttctttccgcctggataccaagtctccttctgtcttgtgatggtcctcctgtttgctgtggacacaggactgtacttttccgtgaaaacgaacatccgcagctccacacgcgattggaaagatcacaagtttaaatggcgcaaagatccccaggacaag

SEQ ID NO: 9235 - DNA, 1875 bp, Artificial Sequence
  Synthetic Polynucleotide
atggccttaccagtgaccgccttgctcctgccgctggccttgctgctccacgccgccaggccggaagtgcaactggttgaatccggtggcggcctggtgcaagcaggcggatctctcagacttagctgtgccgcctccggcagaaccttcacaatgggatggtttaggcaggctccagggaaagagagagagttcgtcgccgccatctctctgtctcccacactggcctactacgccgactctgtgaaaggccggttcaccatctccagagataatgccaagaacaccgtggtgctgcaaatgaactctctgaaacccgaggatacagccctgtactattgtgccgctgaccggaagtccgtgatgagcatcagacccgattactggggacagggcacacaagtcacagtgtcctctggtaccgacatccagatgacacagagccctagcagcctgtctgccagcgtgggagacagagtgaccatcacatgcaaggccagcgaccacatcaacaactggctggcctggtatcagcagaagcctggacaggcccctaagctgctgatctacggcgctaccacactggaaacaggcgtgcccagcagattttctggcagcggctctggcaccgactacaccctgacaatatccagcctccagcctgaggacttcgccacctactactgtcagcagagctggaacaccccttggacattcggccagggcaccaagctggaaatcaagagaggcggaggcggaagtggaggcggaggatctggcggcggaggctctcaagttcagcttcaacagcctggcgctgagctggtcaaacctggcgcttctgtgaagatgagctgcaaagccagcggctacgccttcagcagctactggatcaactggatgaagcagaaacccggccagggactcgaatggatcggccaaatctatcccggcgacggcgacaccaactacaacggcaagttcaagggcagagccacactgaccgccgatacctctagcagcacagcctacatgcagctgagcagcctgaccagcgaagatagcgccgtgtacttctgtgcccggtccatcacaacagtcgtgggctgcgctatggactattggggccagggaacaagcgtgaccgtgtctagtacgcgtggaatgaggactgaggatcttcccaaagctgtcgtctttctcgaaccccaatggtatcgggtgctcgaaaaagactctgtgacactgaaatgccaaggggcctactctcccgaggacaactccacacagtggtttcataatgagtccctcatcagctctcaggccagctcttatttcattgatgccgctacagtggacgactccggcgagtatcggtgtcagaccaatctgtctacactgtctgaccccgtgcagcttgaggtccacattggatggttgctcttgcaagccccacgctgggttttcaaagaggaagatccaatccatctgcggtgccacagctggaaaaacaccgctctccacaaagtcacatacctgcaaaatggcaaaggacgcaaatacttccatcacaattccgatttttacattccgaaggctaccctgaaagacagcggcagctatttctgccggggactcgtcggctccaagaatgtgtcctccgaaaccgtgaatatcacgattacccaaggactggctgtgcctacaatctctagcttctttccgcctggataccaagtctccttctgtcttgtgatggtcctcctgtttgctgtggacacaggactgtacttttccgtgaaaacgaacatccgcagctccacacgcgattggaaagatcacaagtttaaatggcgcaaagatccccaggacaag

SEQ ID NO: 9236 - DNA, 2259 bp, Artificial Sequence
  Synthetic Polynucleotide
atggccttaccagtgaccgccttgctcctgccgctggccttgctgctccacgccgccaggccggaagtgcagctggttgaatctggcggaggactggttcaggctggcggatctctgagactgtcttgtgccgccagcggcagaacctttagcatgggctggtttagacaggcccctggcaaagagagagagttcgtcgccgccatcacatactctggcggcagcccttactacgccgactctgtgaagggcagattcaccatcagccgggacaacgccaagaacaccgtgtacctccagatgaacagcctgaagcctgaggacaccgccgtgtactactgcgccgccaatccaacatacggcagcgactggaacgccgagaattggggccagggaacccaagtgacagtgtctagcctcgagagcggcggaggcggatctttcgaagaagtgcaactggttgaatccggtggcggcctggtgcaagcaggcggatctctcagacttagctgtgccgcctccggcagaaccttcacaatgggatggtttaggcaggctccagggaaagagagagagttcgtcgccgccatctctctgtctcccacactggcctactacgccgactctgtgaaaggccggttcaccatctccagagataatgccaagaacaccgtggtgctgcaaatgaactctctgaaacccgaggatacagccctgtactattgtgccgctgaccggaagtccgtgatgagcatcagacccgattactggggacagggcacacaagtcacagtgtcctctggtaccgacatccagatgacacagagccctagcagcctgtctgccagcgtgggagacagagtgaccatcacatgcaaggccagcgaccacatcaacaactggctggcctggtatcagcagaagcctggacaggcccctaagctgctgatctacggcgctaccacactggaaacaggcgtgcccagcagattttctggcagcggctctggcaccgactacaccctgacaatatccagcctccagcctgaggacttcgccacctactactgtcagcagagctggaacaccccttggacattcggccagggcaccaagctggaaatcaagagaggcggaggcggaagtggaggcggaggatctggcggcggaggctctcaagttcagcttcaacagcctggcgctgagctggtcaaacctggcgcttctgtgaagatgagctgcaaagccagcggctacgccttcagcagctactggatcaactggatgaagcagaaacccggccagggactcgaatggatcggccaaatctatcccggcgacggcgacaccaactacaacggcaagttcaagggcagagccacactgaccgccgatacctctagcagcacagcctacatgcagctgagcagcctgaccagcgaagatagcgccgtgtacttctgtgcccggtccatcacaacagtcgtgggctgcgctatggactattggggccagggaacaagcgtgaccgtgtctagtacgcgtggaatgaggactgaggatcttcccaaagctgtcgtctttctcgaaccccaatggtatcgggtgctcgaaaaagactctgtgacactgaaatgccaaggggcctactctcccgaggacaactccacacagtggtttcataatgagtccctcatcagctctcaggccagctcttatttcattgatgccgctacagtggacgactccggcgagtatcggtgtcagaccaatctgtctacactgtctgaccccgtgcagcttgaggtccacattggatggttgctcttgcaagccccacgctgggttttcaaagaggaagatccaatccatctgcggtgccacagctggaaaaacaccgctctccacaaagtcacatacctgcaaaatggcaaaggacgcaaatacttccatcacaattccgatttttacattccgaaggctaccctgaaagacagcggcagctatttctgccggggactcgtcggctccaagaatgtgtcctccgaaaccgtgaatatcacgattacccaaggactggctgtgcctacaatctctagcttctttccgcctggataccaagtctccttctgtcttgtgatggtcctcctgtttgctgtggacacaggactgtacttttccgtgaaaacgaacatccgcagctccacacgcgattggaaagatcacaagtttaaatggcgcaaagatccccaggacaag

SEQ ID NO: 9237 - DNA, 1500 bp, Artificial Sequence
  Synthetic Polynucleotide
atggccttaccagtgaccgccttgctcctgccgctggccttgctgctccacgccgccaggccgggcgttacccagacacctaagttccaggtgctgaaaaccggccagagcatgaccctgcaatgcgcccaggacatgaaccatgagtacatgagctggtacagacaggaccccggcatgggcctgagactgatccactactctgtggctatccagaccaccgaccagggcgaagtgcccaatggctacaacgtgtccagaagcaccatcgaggacttcccactgagactgctgtctgccgctcctagccagaccagcgtgtacttttgtgccagcagctacgtgggcgataccggcgagctgttctttggcgaaggcagcagactgaccgtgggcggaggcggaagtggaggcggaggatctggcggcggaggctctcaagaagtgacacagatccctgccgctctgtctgtgcctgagggcgaaaacctggtgctgaactgctccttcaccgacagcgccatctacaacctccagtggttcagacaggaccccggcaagggactgacaagcctgctgcttattagcccctggcagagagagcagaccagcggcagactgaatgccagcctggataagtcctccggcagaagcaccctgtatatcgccgcttctcagcctggcgatagcgccacatatctgtgtgccgtcagacccctgctggacggcacatatatccccacctttggcagaggcaccagcctgatcgtgcacccctacacgcgtggaatgaggactgaggatcttcccaaagctgtcgtctttctcgaaccccaatggtatcgggtgctcgaaaaagactctgtgacactgaaatgccaaggggcctactctcccgaggacaactccacacagtggtttcataatgagtccctcatcagctctcaggccagctcttatttcattgatgccgctacagtggacgactccggcgagtatcggtgtcagaccaatctgtctacactgtctgaccccgtgcagcttgaggtccacattggatggttgctcttgcaagccccacgctgggttttcaaagaggaagatccaatccatctgcggtgccacagctggaaaaacaccgctctccacaaagtcacatacctgcaaaatggcaaaggacgcaaatacttccatcacaattccgatttttacattccgaaggctaccctgaaagacagcggcagctatttctgccggggactcgtcggctccaagaatgtgtcctccgaaaccgtgaatatcacgattacccaaggactggctgtgcctacaatctctagcttctttccgcctggataccaagtctccttctgtcttgtgatggtcctcctgtttgctgtggacacaggactgtacttttccgtgaaaacgaacatccgcagctccacacgcgattggaaagatcacaagtttaaatggcgcaaagatccccaggacaag

SEQ ID NO: 9238 - DNA, 1509 bp, Artificial Sequence
  Synthetic Polynucleotide
atggccttaccagtgaccgccttgctcctgccgctggccttgctgctccacgccgccaggccgctggtggacatgaaagtgacccagatgcctcgctacctgattaagcggatgggcgagaacgtgctgctggaatgcggccaggatatgagccacgagacaatgtactggtacagacaggaccctggcctgggcctccagctgatctacatctcctacgacgtggacagcaacagcgagggcgacatccctaagggctacagagtgtcccggaagaagagagagcacttcagcctgatcctggacagcgccaagaccaaccagaccagcgtgtacttctgtgccagcagcagcaccaacaccgaggtgttctttggcaagggcaccagactgaccgtgctcggcggaggcggaagtggaggcggaggatctggcggcggaggctctgacggcgatagcgtgacccagacagagggactcgtgacactgaccgaaggactgcccgtgatgctgaactgcacctaccagacaatctacagcaaccccttcctgttttggtacgtgcagcacctgaacgagagccccagactgctgctgaagtccttcaccgacaacaagcggacagagcaccagggctttcacgccacactgcacaagagcagctccagcttccatctgcaaaagtctagcgcccagctgagcgacagcgccctgtactactgtgccttcgacaccaacacctacaaagtgatcttcggcaagggcacccatctgcacgtgctgcctaatacgcgtggaatgaggactgaggatcttcccaaagctgtcgtctttctcgaaccccaatggtatcgggtgctcgaaaaagactctgtgacactgaaatgccaaggggcctactctcccgaggacaactccacacagtggtttcataatgagtccctcatcagctctcaggccagctcttatttcattgatgccgctacagtggacgactccggcgagtatcggtgtcagaccaatctgtctacactgtctgaccccgtgcagcttgaggtccacattggatggttgctcttgcaagccccacgctgggttttcaaagaggaagatccaatccatctgcggtgccacagctggaaaaacaccgctctccacaaagtcacatacctgcaaaatggcaaaggacgcaaatacttccatcacaattccgatttttacattccgaaggctaccctgaaagacagcggcagctatttctgccggggactcgtcggctccaagaatgtgtcctccgaaaccgtgaatatcacgattacccaaggactggctgtgcctacaatctctagcttctttccgcctggataccaagtctccttctgtcttgtgatggtcctcctgtttgctgtggacacaggactgtacttttccgtgaaaacgaacatccgcagctccacacgcgattggaaagatcacaagtttaaatggcgcaaagatccccaggacaag

SEQ ID NO: 9239 - DNA, 1731 bp, Artificial Sequence
  Synthetic Polynucleotide
atggccttaccagtgaccgccttgctcctgccgctggccttgctgctccacgccgccaggccgatggaccccgacctggaaatcagagccgccttcctgcggcagagaaacacagccctgagaacagaggtggccgagctggaacaagaggtgcagcggctggaaaacgaggtgtcccagtacgagacaagatacggccctctcggaggcggaaaaacgcgtggatccggcggcggaggatctggcggaggcggatctgggggcggaggctctttcgaagacatccagatgacacagagccctagcagcctgtctgccagcgtgggagacagagtgaccatcacatgcaaggccagcgaccacatcaacaactggctggcctggtatcagcagaagcctggacaggcccctaagctgctgatctacggcgctaccacactggaaacaggcgtgcccagcagattttctggcagcggctctggcaccgactacaccctgacaatatccagcctccagcctgaggacttcgccacctactactgtcagcagagctggaacaccccttggacattcggccagggcaccaagctggaaatcaagagaggcggaggcggaagtggaggcggaggatctggcggcggaggctctcaagttcagcttcaacagcctggcgctgagctggtcaaacctggcgcttctgtgaagatgagctgcaaagccagcggctacgccttcagcagctactggatcaactggatgaagcagaaacccggccagggactcgaatggatcggccaaatctatcccggcgacggcgacaccaactacaacggcaagttcaagggcagagccacactgaccgccgatacctctagcagcacagcctacatgcagctgagcagcctgaccagcgaagatagcgccgtgtacttctgtgcccggtccatcacaacagtcgtgggctgcgctatggactattggggccagggaacaagcgtgaccgtgtctagtacgcgtggaatgaggactgaggatcttcccaaagctgtcgtctttctcgaaccccaatggtatcgggtgctcgaaaaagactctgtgacactgaaatgccaaggggcctactctcccgaggacaactccacacagtggtttcataatgagtccctcatcagctctcaggccagctcttatttcattgatgccgctacagtggacgactccggcgagtatcggtgtcagaccaatctgtctacactgtctgaccccgtgcagcttgaggtccacattggatggttgctcttgcaagccccacgctgggttttcaaagaggaagatccaatccatctgcggtgccacagctggaaaaacaccgctctccacaaagtcacatacctgcaaaatggcaaaggacgcaaatacttccatcacaattccgatttttacattccgaaggctaccctgaaagacagcggcagctatttctgccggggactcgtcggctccaagaatgtgtcctccgaaaccgtgaatatcacgattacccaaggactggctgtgcctacaatctctagcttctttccgcctggataccaagtctccttctgtcttgtgatggtcctcctgtttgctgtggacacaggactgtacttttccgtgaaaacgaacatccgcagctccacacgcgattggaaagatcacaagtttaaatggcgcaaagatccccaggacaag

SEQ ID NO: 9240 - DNA, 1731 bp, Artificial Sequence
  Synthetic Polynucleotide
atggccttaccagtgaccgccttgctcctgccgctggccttgctgctccacgccgccaggccgacgcgtatggaccctgatctcgaaattgaggccgcctttctggaacgcgagaacactgccctggaaaccagggtcgcagagctgagacagagagtgcagagactgcggaacagagtgtctcagtaccgcaccagatatggcccactcggcggaggtaaaggatccggcggcggaggatctggcggaggcggatctgggggcggaggctctttcgaagacatccagatgacacagagccctagcagcctgtctgccagcgtgggagacagagtgaccatcacatgcaaggccagcgaccacatcaacaactggctggcctggtatcagcagaagcctggacaggcccctaagctgctgatctacggcgctaccacactggaaacaggcgtgcccagcagattttctggcagcggctctggcaccgactacaccctgacaatatccagcctccagcctgaggacttcgccacctactactgtcagcagagctggaacaccccttggacattcggccagggcaccaagctggaaatcaagagaggcggaggcggaagtggaggcggaggatctggcggcggaggctctcaagttcagcttcaacagcctggcgctgagctggtcaaacctggcgcttctgtgaagatgagctgcaaagccagcggctacgccttcagcagctactggatcaactggatgaagcagaaacccggccagggactcgaatggatcggccaaatctatcccggcgacggcgacaccaactacaacggcaagttcaagggcagagccacactgaccgccgatacctctagcagcacagcctacatgcagctgagcagcctgaccagcgaagatagcgccgtgtacttctgtgcccggtccatcacaacagtcgtgggctgcgctatggactattggggccagggaacaagcgtgaccgtgtctagtacgcgtggaatgaggactgaggatcttcccaaagctgtcgtctttctcgaaccccaatggtatcgggtgctcgaaaaagactctgtgacactgaaatgccaaggggcctactctcccgaggacaactccacacagtggtttcataatgagtccctcatcagctctcaggccagctcttatttcattgatgccgctacagtggacgactccggcgagtatcggtgtcagaccaatctgtctacactgtctgaccccgtgcagcttgaggtccacattggatggttgctcttgcaagccccacgctgggttttcaaagaggaagatccaatccatctgcggtgccacagctggaaaaacaccgctctccacaaagtcacatacctgcaaaatggcaaaggacgcaaatacttccatcacaattccgatttttacattccgaaggctaccctgaaagacagcggcagctatttctgccggggactcgtcggctccaagaatgtgtcctccgaaaccgtgaatatcacgattacccaaggactggctgtgcctacaatctctagcttctttccgcctggataccaagtctccttctgtcttgtgatggtcctcctgtttgctgtggacacaggactgtacttttccgtgaaaacgaacatccgcagctccacacgcgattggaaagatcacaagtttaaatggcgcaaagatccccaggacaag

SEQ ID NO: 9241 - DNA, 1923 bp, Artificial Sequence
  Synthetic Polynucleotide
atggccttaccagtgaccgccttgctcctgccgctggccttgctgctccacgccgccaggccgggcgtgacacagagccccacacacctgattaagaccagaggccagcaggccacactgagatgcagccctatcagcggccacaccagcgtgtactggtatcagcaggctctcggactgggcctccagttcctgctttggtacgacgagggcgaagagagaaaccggggcaacttccctcctcggttttccggcagacagttccccaactacagcagcgagctgaacgtgaacgccctggaactggaagatagcgccctgtacctgtgtgccagctctctcggcggagatgaactgggagccgatggcaacgagcagttctttggccctggcaccagactgaccgtgctggaaggatccggcggcggaggatctggcggaggcggatctgggggcggaggctctttcgaagacatccagatgacacagagccctagcagcctgtctgccagcgtgggagacagagtgaccatcacatgcaaggccagcgaccacatcaacaactggctggcctggtatcagcagaagcctggacaggcccctaagctgctgatctacggcgctaccacactggaaacaggcgtgcccagcagattttctggcagcggctctggcaccgactacaccctgacaatatccagcctccagcctgaggacttcgccacctactactgtcagcagagctggaacaccccttggacattcggccagggcaccaagctggaaatcaagagaggcggaggcggaagtggaggcggaggatctggcggcggaggctctcaagttcagcttcaacagcctggcgctgagctggtcaaacctggcgcttctgtgaagatgagctgcaaagccagcggctacgccttcagcagctactggatcaactggatgaagcagaaacccggccagggactcgaatggatcggccaaatctatcccggcgacggcgacaccaactacaacggcaagttcaagggcagagccacactgaccgccgatacctctagcagcacagcctacatgcagctgagcagcctgaccagcgaagatagcgccgtgtacttctgtgcccggtccatcacaacagtcgtgggctgcgctatggactattggggccagggaacaagcgtgaccgtgtctagtacgcgtggaatgaggactgaggatcttcccaaagctgtcgtctttctcgaaccccaatggtatcgggtgctcgaaaaagactctgtgacactgaaatgccaaggggcctactctcccgaggacaactccacacagtggtttcataatgagtccctcatcagctctcaggccagctcttatttcattgatgccgctacagtggacgactccggcgagtatcggtgtcagaccaatctgtctacactgtctgaccccgtgcagcttgaggtccacattggatggttgctcttgcaagccccacgctgggttttcaaagaggaagatccaatccatctgcggtgccacagctggaaaaacaccgctctccacaaagtcacatacctgcaaaatggcaaaggacgcaaatacttccatcacaattccgatttttacattccgaaggctaccctgaaagacagcggcagctatttctgccggggactcgtcggctccaagaatgtgtcctccgaaaccgtgaatatcacgattacccaaggactggctgtgcctacaatctctagcttctttccgcctggataccaagtctccttctgtcttgtgatggtcctcctgtttgctgtggacacaggactgtacttttccgtgaaaacgaacatccgcagctccacacgcgattggaaagatcacaagtttaaatggcgcaaagatccccaggacaag

SEQ ID NO: 9242 - DNA, 2076 bp, Artificial Sequence
  Synthetic Polynucleotide
atggccttaccagtgaccgccttgctcctgccgctggccttgctgctccacgccgccaggccgatgggcagttggttcgagttctacgaccggctgaatgccatcgacgccagactgtgggctctcggaggatctgaagctgagctggccgccttcgagaaagagatcgccgcctttgagagcgagctgcaagcctacaaaggcaagggcaaccccgaggtggaaaacctgagagtgcacgccgctgccatcagagaatggctccaggcttacagacacaacggcggaggcggatctggtggcggtggatctggaatgggaagctggcttgagttctaccacagactcaacgccattgacagcaggctgtgggcacttggcggaagcgaagctgaactcgccgcttttgaaaaagaaattgccgctttcgagtccgagcttcaggcttacaaaggcaaagggaatcctgaggtcgagagcctgagagatcacgctgcccacattagagagtggttgcaggcataccggcacaatggtggcggaggtagtggcggcggaggttctggaggatccggcggcggaggatctggcggaggcggatctgggggcggaggctctttcgaagacatccagatgacacagagccctagcagcctgtctgccagcgtgggagacagagtgaccatcacatgcaaggccagcgaccacatcaacaactggctggcctggtatcagcagaagcctggacaggcccctaagctgctgatctacggcgctaccacactggaaacaggcgtgcccagcagattttctggcagcggctctggcaccgactacaccctgacaatatccagcctccagcctgaggacttcgccacctactactgtcagcagagctggaacaccccttggacattcggccagggcaccaagctggaaatcaagagaggcggaggcggaagtggaggcggaggatctggcggcggaggctctcaagttcagcttcaacagcctggcgctgagctggtcaaacctggcgcttctgtgaagatgagctgcaaagccagcggctacgccttcagcagctactggatcaactggatgaagcagaaacccggccagggactcgaatggatcggccaaatctatcccggcgacggcgacaccaactacaacggcaagttcaagggcagagccacactgaccgccgatacctctagcagcacagcctacatgcagctgagcagcctgaccagcgaagatagcgccgtgtacttctgtgcccggtccatcacaacagtcgtgggctgcgctatggactattggggccagggaacaagcgtgaccgtgtctagtacgcgtggaatgaggactgaggatcttcccaaagctgtcgtctttctcgaaccccaatggtatcgggtgctcgaaaaagactctgtgacactgaaatgccaaggggcctactctcccgaggacaactccacacagtggtttcataatgagtccctcatcagctctcaggccagctcttatttcattgatgccgctacagtggacgactccggcgagtatcggtgtcagaccaatctgtctacactgtctgaccccgtgcagcttgaggtccacattggatggttgctcttgcaagccccacgctgggttttcaaagaggaagatccaatccatctgcggtgccacagctggaaaaacaccgctctccacaaagtcacatacctgcaaaatggcaaaggacgcaaatacttccatcacaattccgatttttacattccgaaggctaccctgaaagacagcggcagctatttctgccggggactcgtcggctccaagaatgtgtcctccgaaaccgtgaatatcacgattacccaaggactggctgtgcctacaatctctagcttctttccgcctggataccaagtctccttctgtcttgtgatggtcctcctgtttgctgtggacacaggactgtacttttccgtgaaaacgaacatccgcagctccacacgcgattggaaagatcacaagtttaaatggcgcaaagatccccaggacaag

SEQ ID NO: 9243 - DNA, 1791 bp, Artificial Sequence
  Synthetic Polynucleotide
atggccttaccagtgaccgccttgctcctgccgctggccttgctgctccacgccgccaggccgatgggatcttggagcgagttctgggtccgactgggagccatcagagaaagactggatgccctcggaggaagcgaagccgaactggccgccttcgagaaagagatcgccgcctttgagagcgagctgcaagcctacaaaggcaagggcaaccccgaggtggaaaagctgagatacaccgccgctaccatccggcggtttctccaggcttacagacacaatggatccggcggcggaggatctggcggaggcggatctgggggcggaggctctttcgaagacatccagatgacacagagccctagcagcctgtctgccagcgtgggagacagagtgaccatcacatgcaaggccagcgaccacatcaacaactggctggcctggtatcagcagaagcctggacaggcccctaagctgctgatctacggcgctaccacactggaaacaggcgtgcccagcagattttctggcagcggctctggcaccgactacaccctgacaatatccagcctccagcctgaggacttcgccacctactactgtcagcagagctggaacaccccttggacattcggccagggcaccaagctggaaatcaagagaggcggaggcggaagtggaggcggaggatctggcggcggaggctctcaagttcagcttcaacagcctggcgctgagctggtcaaacctggcgcttctgtgaagatgagctgcaaagccagcggctacgccttcagcagctactggatcaactggatgaagcagaaacccggccagggactcgaatggatcggccaaatctatcccggcgacggcgacaccaactacaacggcaagttcaagggcagagccacactgaccgccgatacctctagcagcacagcctacatgcagctgagcagcctgaccagcgaagatagcgccgtgtacttctgtgcccggtccatcacaacagtcgtgggctgcgctatggactattggggccagggaacaagcgtgaccgtgtctagtacgcgtggaatgaggactgaggatcttcccaaagctgtcgtctttctcgaaccccaatggtatcgggtgctcgaaaaagactctgtgacactgaaatgccaaggggcctactctcccgaggacaactccacacagtggtttcataatgagtccctcatcagctctcaggccagctcttatttcattgatgccgctacagtggacgactccggcgagtatcggtgtcagaccaatctgtctacactgtctgaccccgtgcagcttgaggtccacattggatggttgctcttgcaagccccacgctgggttttcaaagaggaagatccaatccatctgcggtgccacagctggaaaaacaccgctctccacaaagtcacatacctgcaaaatggcaaaggacgcaaatacttccatcacaattccgatttttacattccgaaggctaccctgaaagacagcggcagctatttctgccggggactcgtcggctccaagaatgtgtcctccgaaaccgtgaatatcacgattacccaaggactggctgtgcctacaatctctagcttctttccgcctggataccaagtctccttctgtcttgtgatggtcctcctgtttgctgtggacacaggactgtacttttccgtgaaaacgaacatccgcagctccacacgcgattggaaagatcacaagtttaaatggcgcaaagatccccaggacaag

SEQ ID NO: 9244 - DNA, 1002 bp, Artificial Sequence
  Synthetic Polynucleotide
atggccttaccagtgaccgccttgctcctgccgctggccttgctgctccacgccgccaggccgatgggcagctgggaagagttcgagctgagactgaacgccatcgaggaacggctgtatgccctcggaggatctgaagccgagctggcctacttcgagtacgtgatcgccgacttcgagggcaacctgcagcggtacaaaggcaagggcaaccctgaagtggaagccctgtacttcgaggccgacgccatcttcgaggaactggtggcctacagacacaacacgcgtggaatgaggactgaggatcttcccaaagctgtcgtctttctcgaaccccaatggtatcgggtgctcgaaaaagactctgtgacactgaaatgccaaggggcctactctcccgaggacaactccacacagtggtttcataatgagtccctcatcagctctcaggccagctcttatttcattgatgccgctacagtggacgactccggcgagtatcggtgtcagaccaatctgtctacactgtctgaccccgtgcagcttgaggtccacattggatggttgctcttgcaagccccacgctgggttttcaaagaggaagatccaatccatctgcggtgccacagctggaaaaacaccgctctccacaaagtcacatacctgcaaaatggcaaaggacgcaaatacttccatcacaattccgatttttacattccgaaggctaccctgaaagacagcggcagctatttctgccggggactcgtcggctccaagaatgtgtcctccgaaaccgtgaatatcacgattacccaaggactggctgtgcctacaatctctagcttctttccgcctggataccaagtctccttctgtcttgtgatggtcctcctgtttgctgtggacacaggactgtacttttccgtgaaaacgaacatccgcagctccacacgcgattggaaagatcacaagtttaaatggcgcaaagatccccaggacaag

SEQ ID NO: 9245 - DNA, 2151 bp, Artificial Sequence
  Synthetic Polynucleotide
atgggctggatcagaggcagaagaagcagacacagctgggagatgagcgagttccacaactacaacctggacctgaagaagtccgacttcagcacccggtggcagaaacagagatgccccgtggtcaagagcaagtgcagagagaacgcaagccccttcttcttctgttgctttatcgccgtggctatgggcatccgcttcatcatcatggtggctatttggagcgccgtgttcctgaactccctgttcaatcaagaggtgcagatccctctgaccgagagctactgtggcccctgtcctaagaactggatctgctacaagaacaactgctaccagttcttcgacgagagcaagaattggtacgagagccaggccagctgcatgagccagaatgccagcctgctgaaggtgtacagcaaagaggaccaggacctgctgaaactggtcaagtcctaccactggatgggccttgtgcacatccccaccaatggctcttggcagtgggaggacggcagcattctgagccctaacctgctgaccatcatcgagatgcagaagggcgactgcgccctgtacgccagcagctttaagggctacatcgagaattgcagcaccccgaacacctacatctgtatgcagagaaccgttggcggaggcggatctggcggcggaggtagcggtggcggaggatctgaattcgacatcgtgatgacacagagccccgccacactgtcactgtctccaggcgaaagagccacactgagctgtcggagcagcaagagcctccagaacgtgaacggcaacacctacctgtactggttccagcagaagcccggccagtctcctcagctcctgatctacagaatgagcaacctgaacagcggcgtgcccgacagattttctggcagcggaagcggcaccgagttcaccctgaccataagcagcctggaacctgaggacttcgccgtgtactactgtatgcagcacctggaataccccatcaccttcggagccggcaccaagctggaaatcaaaggcggaggcggaagtggaggcggaggatctggcggcggaggctctgaagtgcaactggttgaatctggcggcggactggttaagcctggcggatctctgaagctgagctgtgccgccagcggctacacctttaccagctacgtgatgcactgggtccgacaggcccctggcaaaggacttgagtggatcggctacatcaacccctacaacgatggcaccaagtacaacgagaagttccagggcagagtgaccatcagctccgacaagagcatcagcaccgcctacatggaactgagcagcctgagaagcgaggataccgccatgtactattgcgccagaggcacctactactacggcaccagagtgttcgactactggggccagggaaccctggtcacagtctcttctacgcgtcgcgccaagagaagcggatctggcgtgaagcagaccctgaatttcgacctgctgaagctggctggcgacgtggaatccaacccaggcccttctagaggccatatgaccgagtacaagcccacggtgcgcctcgccacccgcgacgacgtccccagggccgtacgcaccctcgccgccgcgttcgccgactaccccgccacgcgccacaccgtcgatccggaccgccacatcgagcgggtcaccgagctgcaagaactcttcctcacgcgcgtcgggctcgacatcggcaaggtgtgggtcgcggacgacggcgccgcggtggcggtctggaccacgccggagagcgtcgaagcgggggcggtgttcgccgagatcggcccgcgcatggccgagttgagcggttcccggctggccgcgcagcaacagatggaaggcctcctggcgccgcaccggcccaaggagcccgcgtggttcctggccaccgtcggcgtctcgcccgaccaccagggcaagggtctgggcagcgccgtcgtgctccccggagtggaggcggccgagcgcgccggggtgcccgccttcctggagacctccgcgccccgcaacctccccttctacgagcggctcggcttcaccgtcaccgccgacgtcgaggtgcccgaaggaccgcgcacctggtgcatgacccgcaagcccggtgcctga

SEQ ID NO: 9246 - DNA, 2895 bp, Artificial Sequence
  Synthetic Polynucleotide
atggccttaccagtgaccgccttgctcctgccgctggccttgctgctccacgccgccaggccggaattcaatgctggcgtgacccagacacctaagttccaggtgctgaaaaccggccagagcatgaccctgcaatgcgcccaggacatgaaccatgagtacatgagctggtacagacaggaccccggcatgggcctgagactgatccactactctgtggctatccagaccaccgaccagggcgaagtgcccaatggctacaacgtgtccagaagcaccatcgaggacttcccactgagactgctgtctgccgctcctagccagaccagcgtgtacttttgtgccagcagctacctgggcaacaccggcgagctgttttttggcgagggcagcagactgaccgtgctcgaggacctgaagaacgtgttcccacctgaggtggccgtgttcgagcctagcgaggccgagatcagccacacccagaaagccaccctcgtgtgcctggctaccggcttctaccccgaccatgtggaactgtcttggtgggtcaacggcaaagaggtgcacagcggcgtgtctaccgacccccagccactgaaagaacagcccgccctgaacgacagccggtactgcctgagcagcagactgagagtgtccgccaccttctggcagaacccccggaaccacttcagatgccaggtgcagttctacggcctgagcgagaacgacgagtggacccaggacagagccaagcccgtgacccagatcgtgtctgccgaagcctggggcagagccgattgcggatcccagagcttcggcctgctggaccccaagctgtgctacctgctggatggcatcctgttcatctacggcgtgatcctgaccgccctgttcctgagagtgaagttcagcagaagcgccgacgcccctgcctaccagcagggacagaaccaactgtacaacgagctgaacctgggcagacgggaagagtacgacgtgctggacaagcggagaggcagggaccctgagatgggcggaaagccccagcggagaaagaacccccaggaaggactgtataacgaactccagaaagacaagatggccgaagcctacagcgagatcggcatgaagggcgagcggagaagaggcaagggccacgatggcctgtaccagggcctgagcaccgccaccaaggacacctatgacgccctgcacatgcaggccctgcctccaagaagggccaagcgatctggatctggagcaacaaacttctcactactcaaacaagcaggtgacgtggaggagaatcccgggcctactagtatggactggatttggcgcatccttttccttgtcggcgctgctaccggcgcgcattccttcgaacaagaagtgacacagatccctgccgctctgtctgtgcctgagggcgaaaacctggtgctgaactgctccttcaccgacagcgccatctacaacctccagtggttcaggcaggaccctggaaagggactgacaagcctgctgctgatccagagcagccagagagagcagacctccggcagactgaatgccagcctggataagagcagcggcaggtctaccctgtatatcgccgcttctcagcctggcgatagcgccacatatctgtgtgctgtgcggcctacaagcggcggcagctacatccctacatttggcagaggcaccagcctgatcgtgcacccttatacgcgtgagcagaaactgatctcggaagaggatctggggagcggcatccagaaccctgatcctgccgtgtaccagctgcgggatagcaagagcagcgacaagagcgtgtgtctgttcaccgacttcgacagccagaccaacgtgtcccagagcaaggactccgacgtgtacatcaccgataagtgcgtgctggacatgcggagcatggacttcaagagcaactccgccgtggcctggtccaacaagtccgatttcgcctgcgccaacgccttcaacaacagcattatccccgaggacacattcttcccaagcagcgacgtgccctgcgacgtgaagctggtggaaaagagcttcgagacagacaccaacctgaacttccagaacctgagcgtgatcggcttcagaatcctgctgctgaaagtggccggctttaacctgctgatgaccctgcggctgtggtccagccgcgccaagagaagcggatctggcgtgaagcagaccctgaatttcgacctgctgaagctggctggcgacgtggaatccaacccaggcccttctagaggccatatgaccgagtacaagcccacggtgcgcctcgccacccgcgacgacgtccccagggccgtacgcaccctcgccgccgcgttcgccgactaccccgccacgcgccacaccgtcgatccggaccgccacatcgagcgggtcaccgagctgcaagaactcttcctcacgcgcgtcgggctcgacatcggcaaggtgtgggtcgcggacgacggcgccgcggtggcggtctggaccacgccggagagcgtcgaagcgggggcggtgttcgccgagatcggcccgcgcatggccgagttgagcggttcccggctggccgcgcagcaacagatggaaggcctcctggcgccgcaccggcccaaggagcccgcgtggttcctggccaccgtcggcgtctcgcccgaccaccagggcaagggtctgggcagcgccgtcgtgctccccggagtggaggcggccgagcgcgccggggtgcccgccttcctggagacctccgcgccccgcaacctccccttctacgagcggctcggcttcaccgtcaccgccgacgtcgaggtgcccgaaggaccgcgcacctggtgcatgacccgcaagcccggtgcctga

SEQ ID NO: 9247 - DNA, 3081 bp, Artificial Sequence
  Synthetic Polynucleotide
atggccttaccagtgaccgccttgctcctgccgctggccttgctgctccacgccgccaggccggacatccagatgacacagagccctagcagcctgtctgccagcgtgggagacagagtgaccatcacatgcaaggccagcgaccacatcaacaactggctggcctggtatcagcagaagcctggacaggcccctaagctgctgatctacggcgctaccacactggaaacaggcgtgcccagcagattttctggcagcggctctggcaccgactacaccctgacaatatccagcctccagcctgaggacttcgccacctactactgtcagcagagctggaacaccccttggacattcggccagggcaccaagctggaaatcaagagactcgaggacaagcagctggacgccgacgtgtcccccaagcctaccatcttcctgccctctatcgccgagacaaagctccagaaggccggcacctacctgtgcctgctggaaaagttcttcccagatgtgattaagatccactggcaggaaaagaagtccaacaccatcctgggcagccaggaaggcaacaccatgaagaccaacgacacctacatgaagttcagctggctgaccgtgcccgagaagtccctggacaaagaacacagatgcatcgtgcggcacgaaaacaacaagaacggcgtggaccaggaaatcatcttcccacccatcaagaccgatgtgattacaggatcccagagcttcggcctgctggaccccaagctgtgctacctgctggatggcatcctgttcatctacggcgtgatcctgaccgccctgttcctgagagtgaagttcagcagaagcgccgacgcccctgcctaccagcagggacagaaccaactgtacaacgagctgaacctgggcagacgggaagagtacgacgtgctggacaagcggagaggcagggaccctgagatgggcggaaagccccagcggagaaagaacccccaggaaggactgtataacgaactccagaaagacaagatggccgaagcctacagcgagatcggcatgaagggcgagcggagaagaggcaagggccacgatggcctgtaccagggcctgagcaccgccaccaaggacacctatgacgccctgcacatgcaggccctgcctccaagaagggccaagcgatctggatctggagcaacaaacttctcactactcaaacaagcaggtgacgtggaggagaatcccgggcctactagtatggactggatttggcgcatccttttccttgtcggcgctgctaccggcgcgcattccttcgaacaagttcagcttcaacagcctggcgctgagctggtcaaacctggcgcttctgtgaagatgagctgcaaagccagcggctacgccttcagcagctactggatcaactggatgaagcagaaacccggccagggactcgaatggatcggccaaatctatcccggcgacggcgacaccaactacaacggcaagttcaagggcagagccacactgaccgccgatacctctagcagcacagcctacatgcagctgagcagcctgaccagcgaagatagcgccgtgtacttctgtgcccggtccatcacaacagtcgtgggctgcgctatggactattggggccagggaacaagcgtgaccgtgtctagtacgcgtagccagcctcacaccaagcccagcgtgttcgtgatgaagaacggcaccaacgtggcctgcctcgtgaaagagttctaccccaaggacatcaggatcaacctggtgtccagcaagaagatcaccgagttcgaccccgccatcgtgatctcccccagcggcaagtacaacgccgtgaagctggggaagtacgaggacagcaacagcgtgacctgctccgtgcagcacgacaacaagaccgtgcacagcaccgactttggtacccagagttttgggttgttggaccctaaattgtgctatctgttggacggaatcctgttcatttacggagtgatcctgaccgcattgttcctgcgggttaagttttccagatccgcagacgcacccgcttaccaacaagggcagaaccaactctacaatgaacttaatttggggcggagggaagagtacgacgttctggacaaaaggaggggacgagatcccgagatgggcggaaagcctcagcgaaggaagaatccgcaagaggggctttataacgaactccagaaagataaaatggcagaagcctatagtgagattgggatgaagggagaaaggaggaggggtaaaggtcacgatgggttgtaccaaggattgagcacagccactaaagatacctatgatgcgctccacatgcaggccctgccgccaagacgcgccaagagaagcggatctggcgtgaagcagaccctgaatttcgacctgctgaagctggctggcgacgtggaatccaacccaggcccttctagaggccatatgaccgagtacaagcccacggtgcgcctcgccacccgcgacgacgtccccagggccgtacgcaccctcgccgccgcgttcgccgactaccccgccacgcgccacaccgtcgatccggaccgccacatcgagcgggtcaccgagctgcaagaactcttcctcacgcgcgtcgggctcgacatcggcaaggtgtgggtcgcggacgacggcgccgcggtggcggtctggaccacgccggagagcgtcgaagcgggggcggtgttcgccgagatcggcccgcgcatggccgagttgagcggttcccggctggccgcgcagcaacagatggaaggcctcctggcgccgcaccggcccaaggagcccgcgtggttcctggccaccgtcggcgtctcgcccgaccaccagggcaagggtctgggcagcgccgtcgtgctccccggagtggaggcggccgagcgcgccggggtgcccgccttcctggagacctccgcgccccgcaacctccccttctacgagcggctcggcttcaccgtcaccgccgacgtcgaggtgcccgaaggaccgcgcacctggtgcatgacccgcaagcccggtgcctga

SEQ ID NO: 9248 - DNA, 3066 bp, Artificial Sequence
  Synthetic Polynucleotide
atggccttaccagtgaccgccttgctcctgccgctggccttgctgctccacgccgccaggccggacatccagatgacacagagccctagcagcctgtctgccagcgtgggagacagagtgaccatcacatgcaaggccagcgaccacatcaacaactggctggcctggtatcagcagaagcctggacaggcccctaagctgctgatctacggcgctaccacactggaaacaggcgtgcccagcagattttctggcagcggctctggcaccgactacaccctgacaatatccagcctccagcctgaggacttcgccacctactactgtcagcagagctggaacaccccttggacattcggccagggcaccaagctggaaatcaagagactcgaggccgacgtgtcccccaagcctaccatcttcctgccctctatcgccgagacaaagctccagaaggccggcacctacctgtgcctgctggaaaagttcttcccagatgtgattaagatccactggcaggaaaagaagtccaacaccatcctgggcagccaggaaggcaacaccatgaagaccaacgacacctacatgaagttcagctggctgaccgtgcccgagaagtccctggacaaagaacacagatgcatcgtgcggcacgaaaacaacaagaacggcgtggaccaggaaatcatcttcccacccatcaagaccgatgtgattacaggatcccagagcttcggcctgctggaccccaagctgtgctacctgctggatggcatcctgttcatctacggcgtgatcctgaccgccctgttcctgagagtgaagttcagcagaagcgccgacgcccctgcctaccagcagggacagaaccaactgtacaacgagctgaacctgggcagacgggaagagtacgacgtgctggacaagcggagaggcagggaccctgagatgggcggaaagccccagcggagaaagaacccccaggaaggactgtataacgaactccagaaagacaagatggccgaagcctacagcgagatcggcatgaagggcgagcggagaagaggcaagggccacgatggcctgtaccagggcctgagcaccgccaccaaggacacctatgacgccctgcacatgcaggccctgcctccaagaagggccaagcgatctggatctggagcaacaaacttctcactactcaaacaagcaggtgacgtggaggagaatcccgggcctactagtatggactggatttggcgcatccttttccttgtcggcgctgctaccggcgcgcattccttcgaacaagttcagcttcaacagcctggcgctgagctggtcaaacctggcgcttctgtgaagatgagctgcaaagccagcggctacgccttcagcagctactggatcaactggatgaagcagaaacccggccagggactcgaatggatcggccaaatctatcccggcgacggcgacaccaactacaacggcaagttcaagggcagagccacactgaccgccgatacctctagcagcacagcctacatgcagctgagcagcctgaccagcgaagatagcgccgtgtacttctgtgcccggtccatcacaacagtcgtgggctgcgctatggactattggggccagggaacaagcgtgaccgtgtctagtacgcgtagccagcctcacaccaagcccagcgtgttcgtgatgaagaacggcaccaacgtggcctgcctcgtgaaagagttctaccccaaggacatcaggatcaacctggtgtccagcaagaagatcaccgagttcgaccccgccatcgtgatctcccccagcggcaagtacaacgccgtgaagctggggaagtacgaggacagcaacagcgtgacctgctccgtgcagcacgacaacaagaccgtgcacagcaccgactttggtacccagagttttgggttgttggaccctaaattgtgctatctgttggacggaatcctgttcatttacggagtgatcctgaccgcattgttcctgcgggttaagttttccagatccgcagacgcacccgcttaccaacaagggcagaaccaactctacaatgaacttaatttggggcggagggaagagtacgacgttctggacaaaaggaggggacgagatcccgagatgggcggaaagcctcagcgaaggaagaatccgcaagaggggctttataacgaactccagaaagataaaatggcagaagcctatagtgagattgggatgaagggagaaaggaggaggggtaaaggtcacgatgggttgtaccaaggattgagcacagccactaaagatacctatgatgcgctccacatgcaggccctgccgccaagacgcgccaagagaagcggatctggcgtgaagcagaccctgaatttcgacctgctgaagctggctggcgacgtggaatccaacccaggcccttctagaggccatatgaccgagtacaagcccacggtgcgcctcgccacccgcgacgacgtccccagggccgtacgcaccctcgccgccgcgttcgccgactaccccgccacgcgccacaccgtcgatccggaccgccacatcgagcgggtcaccgagctgcaagaactcttcctcacgcgcgtcgggctcgacatcggcaaggtgtgggtcgcggacgacggcgccgcggtggcggtctggaccacgccggagagcgtcgaagcgggggcggtgttcgccgagatcggcccgcgcatggccgagttgagcggttcccggctggccgcgcagcaacagatggaaggcctcctggcgccgcaccggcccaaggagcccgcgtggttcctggccaccgtcggcgtctcgcccgaccaccagggcaagggtctgggcagcgccgtcgtgctccccggagtggaggcggccgagcgcgccggggtgcccgccttcctggagacctccgcgccccgcaacctccccttctacgagcggctcggcttcaccgtcaccgccgacgtcgaggtgcccgaaggaccgcgcacctggtgcatgacccgcaagcccggtgcctga

SEQ ID NO: 9249 - DNA, 2850 bp, Artificial Sequence
  Synthetic Polynucleotide
atgagcaagcagagaggcaccttcagcgaggtgtcactggctcaggaccctaagtggcagcagagaaagcccaagggcaacaagagcagcatcagcggcaccgagcaagagattttccaggtggaactgaacctccagaacgccagcctgaaccaccagggcatcgacaaaatctacgactgccagggcctgctgcctcctccagaaaaactgacagccgaggtgctgggcatcatctgcatcgtgctgatggctaccgtgctgaaaacgattgtgctgatcccattcctggaacagaacaacagcagccccaacgccagaacacagaaggccagacactgcggacactgccccgaggaatggatcacctacagcaacagctgctactacatcggcaaagagcggcggacctgggaagagtctcttcaggcttgcgccagcaagaacagcagctccctgctgtgtatcgacaacgaggaagagatgaagttcctggcctccatcctgcctagcagctggatcggcgtgttcagaaacagctcccaccatccttgggtcaccatcaacggcctggccttcaagcacgaaatcaaggacagcgaccacgccgagagaaactgcgccatgcttcatgtgcggggcctgatctccgatcagtgtggcagctccagaatcatcagacggggcttcatcatgctgacccggctggtgctcaatagcggtggcggtggctcgggcggtggtgggtcgggtggcggcggatctgaattcgacatccagatgacacagagccctagcagcctgtctgccagcgtgggagacagagtgaccatcacatgcaaggccagcgaccacatcaacaactggctggcctggtatcagcagaagcctggacaggcccctaagctgctgatctacggcgctaccacactggaaacaggcgtgcccagcagattttctggcagcggctctggcaccgactacaccctgacaatatccagcctccagcctgaggacttcgccacctactactgtcagcagagctggaacaccccttggacattcggccagggcaccaagctggaaatcaagagactcgagagggccaagcgatctggatctggagcaacaaacttctcactactcaaacaagcaggtgacgtggaggagaatcccgggcctactagtaccatggccgtgttcaagaccacactgtggcggctgatctctggcaccctgggcatcatctgtctgagcctgatgtccacactgggcatcctgctgaagaacagcttcaccaagctgagcatcgagcccgccttcacacccggacctaacatcgaactccagaaggacagcgactgctgctcctgccaagagaaatgggtcggatacagatgcaactgctacttcatcagcagcgagcagaaaacctggaacgagagcagacacctgtgcgccagccagaagtctagcctgctccagctccagaacaccgacgagctggacttcatgtccagcagccagcagttctactggatcggcctgagctacagcgaggaacacacagcttggctgtgggagaatggcagcgccctgagccagtacctgtttcctagcttcgagacattcaacaccaagaactgtatcgcctacaatcccaacggcaacgccctggatgagagctgcgaggacaagaatcggtacatctgcaagcagcagctgatcggcggtggcggttcaggtggagggggaagcggtggtggtggctcattcgaacaagttcagcttcaacagcctggcgctgagctggtcaaacctggcgcttctgtgaagatgagctgcaaagccagcggctacgccttcagcagctactggatcaactggatgaagcagaaacccggccagggactcgaatggatcggccaaatctatcccggcgacggcgacaccaactacaacggcaagttcaagggcagagccacactgaccgccgatacctctagcagcacagcctacatgcagctgagcagcctgaccagcgaagatagcgccgtgtacttctgtgcccggtccatcacaacagtcgtgggctgcgctatggactattggggccagggaacaagcgtgaccgtgtctagtacgcgtcgcgccaagagaagcggatctggcgtgaagcagaccctgaatttcgacctgctgaagctggctggcgacgtggaatccaacccaggcccttctagaggccatatgaccgagtacaagcccacggtgcgcctcgccacccgcgacgacgtccccagggccgtacgcaccctcgccgccgcgttcgccgactaccccgccacgcgccacaccgtcgatccggaccgccacatcgagcgggtcaccgagctgcaagaactcttcctcacgcgcgtcgggctcgacatcggcaaggtgtgggtcgcggacgacggcgccgcggtggcggtctggaccacgccggagagcgtcgaagcgggggcggtgttcgccgagatcggcccgcgcatggccgagttgagcggttcccggctggccgcgcagcaacagatggaaggcctcctggcgccgcaccggcccaaggagcccgcgtggttcctggccaccgtcggcgtctcgcccgaccaccagggcaagggtctgggcagcgccgtcgtgctccccggagtggaggcggccgagcgcgccggggtgcccgccttcctggagacctccgcgccccgcaacctccccttctacgagcggctcggcttcaccgtcaccgccgacgtcgaggtgcccgaaggaccgcgcacctggtgcatgacccgcaagcccggtgcctga

SEQ ID NO: 9250 - DNA, 2793 bp, Artificial Sequence
  Synthetic Polynucleotide
atggccttaccagtgaccgccttgctcctgccgctggccttgctgctccacgccgccaggccggacatccagatgacacagagccctagcagcctgtctgccagcgtgggagacagagtgaccatcacatgcaaggccagcgaccacatcaacaactggctggcctggtatcagcagaagcctggacaggcccctaagctgctgatctacggcgctaccacactggaaacaggcgtgcccagcagattttctggcagcggctctggcaccgactacaccctgacaatatccagcctccagcctgaggacttcgccacctactactgtcagcagagctggaacaccccttggacattcggccagggcaccaagctggaaatcaagagaggcggaggcggaagtggaggcggaggatctggcggcggaggctctcaagttcagcttcaacagcctggcgctgagctggtcaaacctggcgcttctgtgaagatgagctgcaaagccagcggctacgccttcagcagctactggatcaactggatgaagcagaaacccggccagggactcgaatggatcggccaaatctatcccggcgacggcgacaccaactacaacggcaagttcaagggcagagccacactgaccgccgatacctctagcagcacagcctacatgcagctgagcagcctgaccagcgaagatagcgccgtgtacttctgtgcccggtccatcacaacagtcgtgggctgcgctatggactattggggccagggaacaagcgtgaccgtgtctagtacgcgtggcggaggcggaagtggaggcggaggatctggcggcggaggctctgcgcgtggaatgaggactgaggatcttcccaaagctgtcgtctttctcgaaccccaatggtatcgggtgctcgaaaaagactctgtgacactgaaatgccaaggggcctactctcccgaggacaactccacacagtggtttcataatgagtccctcatcagctctcaggccagctcttatttcattgatgccgctacagtggacgactccggcgagtatcggtgtcagaccaatctgtctacactgtctgaccccgtgcagcttgaggtccacattggatggttgctcttgcaagccccacgctgggttttcaaagaggaagatccaatccatctgcggtgccacagctggaaaaacaccgctctccacaaagtcacatacctgcaaaatggcaaaggacgcaaatacttccatcacaattccgatttttacattccgaaggctaccctgaaagacagcggcagctatttctgccggggactcgtcggctccaagaatgtgtcctccgaaaccgtgaatatcacgattacccaaggactggctgtgcctacaatctctagcttctttccgcctggataccaagtctccttctgtcttgtgatggtcctcctgtttgctgtggacacaggactgtacttttccgtgaaaacgaacatccgcagctccacacgcgattggaaagatcacaagtttaaatggcgcaaagatccccaggacaagcgcgccaagagaagcggatctggcgtgaagcagaccctgaatttcgacctgctgaagctggctggcgacgtggaatccaacccaggcccttctagaatggcctcctatccttgtcaccagcacgccagcgcattcgatcaggccgctagaagcagaggccacagcaacagaagaacagccctgcggcctcggagacagcaagaggctacagaagttcggctggaacagaagatgcccacactgctgcgggtgtacatcgacggacctcacggcatgggcaagaccaccacaacacagctgctggtggccctgggaagcagagatgacatcgtgtacgtgcccgagcctatgacctactggcaggttctgggagccagcgagacaatcgccaacatctacaccacacagcaccggctggatcagggcgaaatttctgctggcgacgccgccgtggttatgacatctgcccagatcacaatgggaatgccctacgccgtgaccgatgctgtgctggctcctcatgttggcggagaggccggatcttctcatgctcctccaccagctctgaccctgatcttcgacagacaccctatcgccgctctgctgtgttatcctgccgccagatacctgatgggcagcatgacacctcaggccgtgctggctttcgtggccctgattcctcctacactgcccggcaccaatatcgtgctgggagccctgcatgaggaccggcacattgatagactggctaagagacagcggcctggcgagagactggatctggctatgctggccgccatcagaagagtgtacggcctgctggctaacaccgtgcggtatcttcaaggcggcggatcttggtgggaagattggggacagctgagcggcacagcagttcctccacaaggtgccgagcctcagtctaacgctggacccagacctcacatcggcgacaccctgtttaccctgttcagagcccctgaactgctggcccctaacggcgacctgtacaacgttttcgcctgggctctcgacgtgctggcaaaaagactgcggcccatgcacgtgttcatcctggactacgatcagtcccctgccggctgtagagatgccctgctgcaactgacaagcggcatggtgcagacccacgtgacaacacctggcagcatccccaccatttgcgatctggcccggaccttcgctagagagatgggcgaagctaactaa

SEQ ID NO: 9251 - DNA, 2595 bp, Artificial Sequence
  Synthetic Polynucleotide
atggccttaccagtgaccgccttgctcctgccgctggccttgctgctccacgccgccaggccggacatccagatgacacagagccctagcagcctgtctgccagcgtgggagacagagtgaccatcacatgcaaggccagcgaccacatcaacaactggctggcctggtatcagcagaagcctggacaggcccctaagctgctgatctacggcgctaccacactggaaacaggcgtgcccagcagattttctggcagcggctctggcaccgactacaccctgacaatatccagcctccagcctgaggacttcgccacctactactgtcagcagagctggaacaccccttggacattcggccagggcaccaagctggaaatcaagagaggcggaggcggaagtggaggcggaggatctggcggcggaggctctcaagttcagcttcaacagcctggcgctgagctggtcaaacctggcgcttctgtgaagatgagctgcaaagccagcggctacgccttcagcagctactggatcaactggatgaagcagaaacccggccagggactcgaatggatcggccaaatctatcccggcgacggcgacaccaactacaacggcaagttcaagggcagagccacactgaccgccgatacctctagcagcacagcctacatgcagctgagcagcctgaccagcgaagatagcgccgtgtacttctgtgcccggtccatcacaacagtcgtgggctgcgctatggactattggggccagggaacaagcgtgaccgtgtctagtacgcgtggcggaggcggaagtggaggcggaggatctggcggcggaggctctgcgcgtggaatgaggactgaggatcttcccaaagctgtcgtctttctcgaaccccaatggtatcgggtgctcgaaaaagactctgtgacactgaaatgccaaggggcctactctcccgaggacaactccacacagtggtttcataatgagtccctcatcagctctcaggccagctcttatttcattgatgccgctacagtggacgactccggcgagtatcggtgtcagaccaatctgtctacactgtctgaccccgtgcagcttgaggtccacattggatggttgctcttgcaagccccacgctgggttttcaaagaggaagatccaatccatctgcggtgccacagctggaaaaacaccgctctccacaaagtcacatacctgcaaaatggcaaaggacgcaaatacttccatcacaattccgatttttacattccgaaggctaccctgaaagacagcggcagctatttctgccggggactcgtcggctccaagaatgtgtcctccgaaaccgtgaatatcacgattacccaaggactggctgtgcctacaatctctagcttctttccgcctggataccaagtctccttctgtcttgtgatggtcctcctgtttgctgtggacacaggactgtacttttccgtgaaaacgaacatccgcagctccacacgcgattggaaagatcacaagtttaaatggcgcaaagatccccaggacaagcgcgccaagagaagcggatctggcgtgaagcagaccctgaatttcgacctgctgaagctggctggcgacgtggaatccaacccaggcccttctagaatggctctgcctagacggcctcctacactgaccagagtgtacctggatggccctttcggcatcggcaagaccagcatcctgaacgccatgccagatcacacccctgacggcgctcctatcctgaaggtgtacgagcccatgaagtactggcggtgccagagcactgatctggtggtggccgctaacgagacacccgagagaagaagaggcggagccctgagcagattccagagcgacatgattatggcctccatccaggccagattcgccgatccttacctgctgttccacgaacggctgagcagcaagtgccggggcaagatcgagatttgcgacacccctgccatcatcctgatgctggacagacatcctgtggccgccatcctgtgcttccccatcacaagatacctgctgggcgagtacagcctggaaatgctgatctcctccatcatcagactgcccctggaaagccccggctgcaatctgaccgtgaccatcctgcctgacgagaaagaacacgtgaaccggatctgctccagagacagacctggcgagacagccgaccggaacatgctgagaacactgaacgccgtgtacgccagcctggtggacacagtgaagtacgccaacctgacatgcccctatgagaaagaaagctgggagatggaatggctgggcctgccttggtttgaggaaagcctgctggaagagttcatcagcagaccccggcctgtgatctgtagcagaacccggatgcctctggacagaaccctgctggctatcttcaagcggaaagagctgtgcagcgagaacggcgagctgctgacacagtacagctggattctgtggggcctgctgaccaagctgcacaccatcaacgtggaactgttcgacatcagcggcatgtctcggagagagtgcgctacactttaa

SEQ ID NO: 9252 - DNA, 1863 bp, Artificial Sequence; identical to SEQ ID NO: 7680
  Synthetic Polynucleotide

SEQ ID NO: 9253 - DNA, 2853 bp, Artificial Sequence
  Synthetic Polynucleotide
atggccttaccagtgaccgccttgctcctgccgctggccttgctgctccacgccgccaggccggacatccagatgacacagagccctagcagcctgtctgccagcgtgggagacagagtgaccatcacatgcaaggccagcgaccacatcaacaactggctggcctggtatcagcagaagcctggacaggcccctaagctgctgatctacggcgctaccacactggaaacaggcgtgcccagcagattttctggcagcggctctggcaccgactacaccctgacaatatccagcctccagcctgaggacttcgccacctactactgtcagcagagctggaacaccccttggacattcggccagggcaccaagctggaaatcaagagaggcggaggcggaagtggaggcggaggatctggcggcggaggctctcaagttcagcttcaacagcctggcgctgagctggtcaaacctggcgcttctgtgaagatgagctgcaaagccagcggctacgccttcagcagctactggatcaactggatgaagcagaaacccggccagggactcgaatggatcggccaaatctatcccggcgacggcgacaccaactacaacggcaagttcaagggcagagccacactgaccgccgatacctctagcagcacagcctacatgcagctgagcagcctgaccagcgaagatagcgccgtgtacttctgtgcccggtccatcacaacagtcgtgggctgcgctatggactattggggccagggaacaagcgtgaccgtgtctagtacgcgtaaaattgaagttatgtatcctcctccttacctagacaatgagaagagcaatggaaccattatccatgtgaaagggggatccgtggtggaaaaagagcaccctcagctcggagccggaacagtgctgcttctgagagccggcttttacgccgtgtcctttctgtctgtggccgtgggcagcaccgtgtactatcagggcaagtgcctgacctggaagggacctagaaggcaactgcctgctgtggtgcctgctcctttgcctcctccatgtggaagctctgcccatctgctgccacctgttccaggcggaagggccaagcgatctggatctggagcaacaaacttctcactactcaaacaagcaggtgacgtggaggagaatcccgggcctactagtatggactggatttggcgcatccttttccttgtcggcgctgctaccggcgcgcattccttcgaagaagttcaactggtgcagagcggagccgaagtgaagaagccaggcgagagcctgaagattagctgcaaaggcagcggctacagcttcaccagctactggatcggctgggtccgacagatgcctggcaaaggactggaatggatgggcatcatctaccccggcgacagcgacaccagatacagccctagctttcagggccaagtgaccatctccgccgacaagagcatcagcacagcctacctccagtggtcctctctgaaggccagcgataccgccatgtactactgcgccagacaagtctggggatggcaaggcggcatgtaccccaggtctaactggtggtacaacctggactcttggggccagggcacactggtcacagtctcttctgcctctacaaagggaccctccgtgtttcctctggctcccagcagcaagtctacaagcggaggaacagccgctctgggctgcctggtcaaggattactttcccgagcctgtgaccgtgtcctggaatagcggagcactgacaagcggcgtgcacacctttccagccgtgctgcaaagcagcggcctgtactctctgagcagcgtggtcacagtgcctagctctagcctgggcacccagacctacatctgcaatgtgaaccacaagcctagcaacaccaaggtggacaagagagtggaacccaagagctgtggtaccatcactcaaggtttggcagtgtcaaccatctcatcattctttccacctggctaccaagtgtccttctgcctggtcatggtgctgctgttcgccgtggataccggcctgtacttcagcgtcaagaccaacatccggtccagcaccagagactggaaggaccacaagttcaagtggcggaaggaccctcaggacaagagggccaagcgatctggatctggagcaacaaacttctcactactcaaacaagcaggtgacgtggaggagaatcccgggccttctagaggccatatgaccgagtacaagcccacggtgcgcctcgccacccgcgacgacgtccccagggccgtacgcaccctcgccgccgcgttcgccgactaccccgccacgcgccacaccgtcgatccggaccgccacatcgagcgggtcaccgagctgcaagaactcttcctcacgcgcgtcgggctcgacatcggcaaggtgtgggtcgcggacgacggcgccgcggtggcggtctggaccacgccggagagcgtcgaagcgggggcggtgttcgccgagatcggcccgcgcatggccgagttgagcggttcccggctggccgcgcagcaacagatggaaggcctcctggcgccgcaccggcccaaggagcccgcgtggttcctggccaccgtcggcgtctcgcccgaccaccagggcaagggtctgggcagcgccgtcgtgctccccggagtggaggcggccgagcgcgccggggtgcccgccttcctggagacctccgcgccccgcaacctccccttctacgagcggctcggcttcaccgtcaccgccgacgtcgaggtgcccgaaggaccgcgcacctggtgcatgacccgcaagcccggtgcctga

SEQ ID NO: 9254 - DNA, 1923 bp, Artificial Sequence; identical to SEQ ID NO: 7695
  Synthetic Polynucleotide

SEQ ID NO: 9255 - DNA, 3156 bp, Artificial Sequence; identical to SEQ ID NO: 2287
  Synthetic Polynucleotide

SEQ ID NO: 9256 - DNA, 1830 bp, Artificial Sequence; identical to SEQ ID NO: 7693
  Synthetic Polynucleotide

SEQ ID NO: 9257 - DNA, 2208 bp, Artificial Sequence; identical to SEQ ID NO: 7694
  Synthetic Polynucleotide

SEQ ID NO: 9258 - DNA, 3156 bp, Artificial Sequence; identical to SEQ ID NO: 2287
  Synthetic Polynucleotide

SEQ ID NO: 9259 - DNA, 3111 bp, Artificial Sequence; identical to SEQ ID NO: 2289
  Synthetic Polynucleotide

SEQ ID NO: 9260 - DNA, 3147 bp, Artificial Sequence
  Synthetic Polynucleotide
atggccttaccagtgaccgccttgctcctgccgctggccttgctgctccacgccgccaggccggacatccagatgacacagactacatcctccctgtctgcctctctgggagacagagtcaccatcagttgcagggcaagtcaggacattagtaagtacctgaactggtatcagcagaaaccagatggaactgttaaactcctgatctaccatacatcaagattacactcaggagtcccatcaaggttcagtggcagtgggtctggaacagattattctctcaccattagcaacctggagcaagaagatattgccacttacttttgccaacagggtaatacgcttccgtacacgttcggaggggggaccaagctggagatcacactcgaggacctgaagaacgtgttcccacctgaggtggccgtgttcgagcctagcaaggccgagatcgcccacacccagaaagccaccctcgtgtgcctggctaccggcttctaccccgaccatgtggaactgtcttggtgggtcaacggcaaagaggtgcacagcggcgtgtgtaccgacccccagccactgaaagaacagcccgccctgaacgacagccggtactgcctgagcagcagactgagagtgtccgccaccttctggcagaacccccggaaccacttcagatgccaggtgcagttctacggcctgagcgagaacgacgagtggacccaggacagagccaagcccgtgacccagatcgtgtctgccgaagcctggggcagagccgattgcggatcccagagcttcggcctgctggaccccaagctgtgctacctgctggatggcatcctgttcatctacggcgtgatcctgaccgccctgttcctgagagtgaagttcagcagaagcgccgacgcccctgcctaccagcagggacagaaccaactgtacaacgagctgaacctgggcagacgggaagagtacgacgtgctggacaagcggagaggcagggaccctgagatgggcggaaagccccagcggagaaagaacccccaggaaggactgtataacgaactccagaaagacaagatggccgaagcctacagcgagatcggcatgaagggcgagcggagaagaggcaagggccacgatggcctgtaccagggcctgagcaccgccaccaaggacacctatgacgccctgcacatgcaggccctgcctccaagaagggccaagcgatctggatctggagcaacaaacttctcactactcaaacaagcaggtgacgtggaggagaatcccgggcctactagtatggactggatttggcgcatccttttccttgtcggcgctgctaccggcgcgcattccttcgaagtgaaactgcaggagtcaggacctggcctggtggcgccctcacagagcctgtccgtcacatgcactgtctcaggggtctcattacccgactatggtgtaagctggattcgccagcctccacgaaagggtctggagtggctgggagtaatatggggtagtgaaaccacatactataattcagctctcaaatccagactgaccatcatcaaggacaactccaagagccaagttttcttaaaaatgaacagtctgcaaactgatgacacagccatttactactgtgccaaacattattactacggtggtagctatgctatggactactggggccaaggaacctcagtcaccgtctcctcaacgcgtatccagaaccctgatcctgccgtgtaccagctgcgggatagcaagagcagcgacaagagcgtgtgtctgttcaccgacttcgacagccagaccaacgtgtcccagagcaaggactccgacgtgtacatcaccgataagtgcgtgctggacatgcggagcatggacttcaagagcaactccgccgtggcctggtccaacaagtccgatttcgcctgcgccaacgccttcaacaacagcattatccccgaggacacattcttcccaagccccgagagcagctgcggtacccagagttttgggttgttggaccctaaattgtgctatctgttggacggaatcctgttcatttacggagtgatcctgaccgcattgttcctgcgggttaagttttccagatccgcagacgcacccgcttaccaacaagggcagaaccaactctacaatgaacttaatttggggcggagggaagagtacgacgttctggacaaaaggaggggacgagatcccgagatgggcggaaagcctcagcgaaggaagaatccgcaagaggggctttataacgaactccagaaagataaaatggcagaagcctatagtgagattgggatgaagggagaaaggaggaggggtaaaggtcacgatgggttgtaccaaggattgagcacagccactaaagatacctatgatgcgctccacatgcaggccctgccgccaagacgcgccaagagaagcggatctggcgtgaagcagaccctgaatttcgacctgctgaagctggctggcgacgtggaatccaacccaggcccttctagaggccatatgaccgagtacaagcccacggtgcgcctcgccacccgcgacgacgtccccagggccgtacgcaccctcgccgccgcgttcgccgactaccccgccacgcgccacaccgtcgatccggaccgccacatcgagcgggtcaccgagctgcaagaactcttcctcacgcgcgtcgggctcgacatcggcaaggtgtgggtcgcggacgacggcgccgcggtggcggtctggaccacgccggagagcgtcgaagcgggggcggtgttcgccgagatcggcccgcgcatggccgagttgagcggttcccggctggccgcgcagcaacagatggaaggcctcctggcgccgcaccggcccaaggagcccgcgtggttcctggccaccgtcggcgtctcgcccgaccaccagggcaagggtctgggcagcgccgtcgtgctccccggagtggaggcggccgagcgcgccggggtgcccgccttcctggagacctccgcgccccgcaacctccccttctacgagcggctcggcttcaccgtcaccgccgacgtcgaggtgcccgaaggaccgcgcacctggtgcatgacccgcaagcccggtgcctga

SEQ ID NO: 9261 - DNA, 3111 bp, Artificial Sequence; identical to SEQ ID NO: 2289
  Synthetic Polynucleotide

SEQ ID NO: 9262 - DNA, 2217 bp, Artificial Sequence; identical to SEQ ID NO: 7676
  Synthetic Polynucleotide

SEQ ID NO: 9263 - DNA, 2952 bp, Artificial Sequence
  Synthetic Polynucleotide
atggccttaccagtgaccgccttgctcctgccgctggccttgctgctccacgccgccaggccggacatccagatgacacagagccctagcagcctgtctgccagcgtgggagacagagtgaccatcacatgcaaggccagcgaccacatcaacaactggctggcctggtatcagcagaagcctggacaggcccctaagctgctgatctacggcgctaccacactggaaacaggcgtgcccagcagattttctggcagcggctctggcaccgactacaccctgacaatatccagcctccagcctgaggacttcgccacctactactgtcagcagagctggaacaccccttggacattcggccagggcaccaagctggaaatcaagagactcgagggacagcctaaggccaatcctaccgtgacactgttccctccaagcagcgaagaactccaggccaacaaggccacacttgtgtgcctgatctccgacttctaccctggggctgtgacagtggcttggaaggccgatggatctcctgtgaaagccggcgtggaaaccaccaagccatccaagcagagcaacaacaaatacgccgccagctcctacctgagcctgacacctgagcagtggaagtcccacagatcctacagctgccaagtgacccacgaaggcagcaccgtggaaaagacagtggcccctacagagtgcagcggatcccagagcttcggcctgctggaccccaagctgtgctacctgctggatggcatcctgttcatctacggcgtgatcctgaccgccctgttcctgagagtgaagttcagcagaagcgccgacgcccctgcctaccagcagggacagaaccaactgtacaacgagctgaacctgggcagacgggaagagtacgacgtgctggacaagcggagaggcagggaccctgagatgggcggaaagccccagcggagaaagaacccccaggaaggactgtataacgaactccagaaagacaagatggccgaagcctacagcgagatcggcatgaagggcgagcggagaagaggcaagggccacgatggcctgtaccagggcctgagcaccgccaccaaggacacctatgacgccctgcacatgcaggccctgcctccaagaagggccaagcgatctggatctggagcaacaaacttctcactactcaaacaagcaggtgacgtggaggagaatcccgggcctactagtatggactggatttggcgcatccttttccttgtcggcgctgctaccggcgcgcattccttcgaacaagttcagcttcaacagcctggcgctgagctggtcaaacctggcgcttctgtgaagatgagctgcaaagccagcggctacgccttcagcagctactggatcaactggatgaagcagaaacccggccagggactcgaatggatcggccaaatctatcccggcgacggcgacaccaactacaacggcaagttcaagggcagagccacactgaccgccgatacctctagcagcacagcctacatgcagctgagcagcctgaccagcgaagatagcgccgtgtacttctgtgcccggtccatcacaacagtcgtgggctgcgctatggactattggggccagggaacaagcgtgaccgtgtctagtacgcgtgcctctacaaagggaccctccgtgtttcctctggctcccagcagcaagtctacaagcggaggaacagccgctctgggctgcctggtcaaggattactttcccgagcctgtgaccgtgtcctggaatagcggagcactgacaagcggcgtgcacacctttccagccgtgctgcaaagcagcggcctgtactctctgagcagcgtggtcacagtgcctagctctagcctgggcacccagacctacatctgcaatgtgaaccacaagcctagcaacaccaaggtggacaagagagtggaacccaagagctgtggtaccggcgacatcgagaacaccagtctggcccctgaggaccctacctttcctgccgatacctggggcacctacctgctgaccacagagacaggactccagaaagatcacgccctgtgggaccacacagcccagaacctgctgagaatgggcctcgcctttctggtgctggttgccctcgtgtggttcctggtggaagattggctgagccggaagcggacaagagagagagccagcagagcctctacctgggagggaagaagaaggctgaacacccagacacttagggccaagcgatctggatctggagcaacaaacttctcactactcaaacaagcaggtgacgtggaggagaatcccgggccttctagaggccatatgaccgagtacaagcccacggtgcgcctcgccacccgcgacgacgtccccagggccgtacgcaccctcgccgccgcgttcgccgactaccccgccacgcgccacaccgtcgatccggaccgccacatcgagcgggtcaccgagctgcaagaactcttcctcacgcgcgtcgggctcgacatcggcaaggtgtgggtcgcggacgacggcgccgcggtggcggtctggaccacgccggagagcgtcgaagcgggggcggtgttcgccgagatcggcccgcgcatggccgagttgagcggttcccggctggccgcgcagcaacagatggaaggcctcctggcgccgcaccggcccaaggagcccgcgtggttcctggccaccgtcggcgtctcgcccgaccaccagggcaagggtctgggcagcgccgtcgtgctccccggagtggaggcggccgagcgcgccggggtgcccgccttcctggagacctccgcgccccgcaacctccccttctacgagcggctcggcttcaccgtcaccgccgacgtcgaggtgcccgaaggaccgcgcacctggtgcatgacccgcaagcccggtgcctga

SEQ ID NO: 9264 - DNA, 3150 bp, Artificial Sequence
  Synthetic Polynucleotide
atggccttaccagtgaccgccttgctcctgccgctggccttgctgctccacgccgccaggccggacatccagatgacacagagccctagcagcctgtctgccagcgtgggagacagagtgaccatcacatgcaaggccagcgaccacatcaacaactggctggcctggtatcagcagaagcctggacaggcccctaagctgctgatctacggcgctaccacactggaaacaggcgtgcccagcagattttctggcagcggctctggcaccgactacaccctgacaatatccagcctccagcctgaggacttcgccacctactactgtcagcagagctggaacaccccttggacattcggccagggcaccaagctggaaatcaagagactcgagggacagcctaaggccaatcctaccgtgacactgttccctccaagcagcgaagaactccaggccaacaaggccacacttgtgtgcctgatctccgacttctaccctggggctgtgacagtggcttggaaggccgatggatctcctgtgaaagccggcgtggaaaccaccaagccatccaagcagagcaacaacaaatacgccgccagctcctacctgagcctgacacctgagcagtggaagtcccacagatcctacagctgccaagtgacccacgaaggcagcaccgtggaaaagacagtggcccctacagagtgcagcggatcccagagcttcggcctgctggaccccaagctgtgctacctgctggatggcatcctgttcatctacggcgtgatcctgaccgccctgttcctgagagtgaagttcagcagaagcgccgacgcccctgcctaccagcagggacagaaccaactgtacaacgagctgaacctgggcagacgggaagagtacgacgtgctggacaagcggagaggcagggaccctgagatgggcggaaagccccagcggagaaagaacccccaggaaggactgtataacgaactccagaaagacaagatggccgaagcctacagcgagatcggcatgaagggcgagcggagaagaggcaagggccacgatggcctgtaccagggcctgagcaccgccaccaaggacacctatgacgccctgcacatgcaggccctgcctccaagaagggccaagcgatctggatctggagcaacaaacttctcactactcaaacaagcaggtgacgtggaggagaatcccgggcctactagtatggactggatttggcgcatccttttccttgtcggcgctgctaccggcgcgcattccttcgaacaagttcagcttcaacagcctggcgctgagctggtcaaacctggcgcttctgtgaagatgagctgcaaagccagcggctacgccttcagcagctactggatcaactggatgaagcagaaacccggccagggactcgaatggatcggccaaatctatcccggcgacggcgacaccaactacaacggcaagttcaagggcagagccacactgaccgccgatacctctagcagcacagcctacatgcagctgagcagcctgaccagcgaagatagcgccgtgtacttctgtgcccggtccatcacaacagtcgtgggctgcgctatggactattggggccagggaacaagcgtgaccgtgtctagtacgcgtgcctctacaaagggaccctccgtgtttcctctggctcccagcagcaagtctacaagcggaggaacagccgctctgggctgcctggtcaaggattactttcccgagcctgtgaccgtgtcctggaatagcggagcactgacaagcggcgtgcacacctttccagccgtgctgcaaagcagcggcctgtactctctgagcagcgtggtcacagtgcctagctctagcctgggcacccagacctacatctgcaatgtgaaccacaagcctagcaacaccaaggtggacaagagagtggaacccaagagctgtggtaccaagtctgtgcgcttttacctggtcgtcagccctgccagtgcctccactcagacatcttggaccccaagggaccttgtgtcctctcagacacagacacagtcctgcgtgccaccaactgctggcgcaagacaggctccagagtctcccagcacaatccccgtcccttctcagccccagaactccacacttaggccaggaccagctgctccaatcgcactggtcccagtgttctgcggactgctggttgccaagtctctggtgctgagcgcactcctcgtttggtggggcgatatttggtggaaaacgatgatggaattgagatccctcgatacgcagaaagccacatgccaccttcagcaagtcacagacttgccttggaccagcgtcagctctcccgtggaacgggaaattctgtatcatacagtggcccgcaccaagatttccgacgatgacgacgagcacacactgcgcgccaagagaagcggatctggcgtgaagcagaccctgaatttcgacctgctgaagctggctggcgacgtggaatccaacccaggcccttctagaggccatatgaccgagtacaagcccacggtgcgcctcgccacccgcgacgacgtccccagggccgtacgcaccctcgccgccgcgttcgccgactaccccgccacgcgccacaccgtcgatccggaccgccacatcgagcgggtcaccgagctgcaagaactcttcctcacgcgcgtcgggctcgacatcggcaaggtgtgggtcgcggacgacggcgccgcggtggcggtctggaccacgccggagagcgtcgaagcgggggcggtgttcgccgagatcggcccgcgcatggccgagttgagcggttcccggctggccgcgcagcaacagatggaaggcctcctggcgccgcaccggcccaaggagcccgcgtggttcctggccaccgtcggcgtctcgcccgaccaccagggcaagggtctgggcagcgccgtcgtgctccccggagtggaggcggccgagcgcgccggggtgcccgccttcctggagacctccgcgccccgcaacctccccttctacgagcggctcggcttcaccgtcaccgccgacgtcgaggtgcccgaaggaccgcgcacctggtgcatgacccgcaagcccggtgcctga

SEQ ID NO: 9265 - DNA, 2910 bp, Artificial Sequence
  Synthetic Polynucleotide
atggccttaccagtgaccgccttgctcctgccgctggccttgctgctccacgccgccaggccggacatccagatgacacagagccctagcagcctgtctgccagcgtgggagacagagtgaccatcacatgcaaggccagcgaccacatcaacaactggctggcctggtatcagcagaagcctggacaggcccctaagctgctgatctacggcgctaccacactggaaacaggcgtgcccagcagattttctggcagcggctctggcaccgactacaccctgacaatatccagcctccagcctgaggacttcgccacctactactgtcagcagagctggaacaccccttggacattcggccagggcaccaagctggaaatcaagagactcgagggacagcctaaggccaatcctaccgtgacactgttccctccaagcagcgaagaactccaggccaacaaggccacacttgtgtgcctgatctccgacttctaccctggggctgtgacagtggcttggaaggccgatggatctcctgtgaaagccggcgtggaaaccaccaagccatccaagcagagcaacaacaaatacgccgccagctcctacctgagcctgacacctgagcagtggaagtcccacagatcctacagctgccaagtgacccacgaaggcagcaccgtggaaaagacagtggcccctacagagtgcagcggatcccagagcttcggcctgctggaccccaagctgtgctacctgctggatggcatcctgttcatctacggcgtgatcctgaccgccctgttcctgagagtgaagttcagcagaagcgccgacgcccctgcctaccagcagggacagaaccaactgtacaacgagctgaacctgggcagacgggaagagtacgacgtgctggacaagcggagaggcagggaccctgagatgggcggaaagccccagcggagaaagaacccccaggaaggactgtataacgaactccagaaagacaagatggccgaagcctacagcgagatcggcatgaagggcgagcggagaagaggcaagggccacgatggcctgtaccagggcctgagcaccgccaccaaggacacctatgacgccctgcacatgcaggccctgcctccaagaagggccaagcgatctggatctggagcaacaaacttctcactactcaaacaagcaggtgacgtggaggagaatcccgggcctactagtatggactggatttggcgcatccttttccttgtcggcgctgctaccggcgcgcattccttcgaacaagttcagcttcaacagcctggcgctgagctggtcaaacctggcgcttctgtgaagatgagctgcaaagccagcggctacgccttcagcagctactggatcaactggatgaagcagaaacccggccagggactcgaatggatcggccaaatctatcccggcgacggcgacaccaactacaacggcaagttcaagggcagagccacactgaccgccgatacctctagcagcacagcctacatgcagctgagcagcctgaccagcgaagatagcgccgtgtacttctgtgcccggtccatcacaacagtcgtgggctgcgctatggactattggggccagggaacaagcgtgaccgtgtctagtacgcgtgcctctacaaagggaccctccgtgtttcctctggctcccagcagcaagtctacaagcggaggaacagccgctctgggctgcctggtcaaggattactttcccgagcctgtgaccgtgtcctggaatagcggagcactgacaagcggcgtgcacacctttccagccgtgctgcaaagcagcggcctgtactctctgagcagcgtggtcacagtgcctagctctagcctgggcacccagacctacatctgcaatgtgaaccacaagcctagcaacaccaaggtggacaagagagtggaacccaagagctgtggtaccgtggtcgagaaagaacatccacagcttggcgctggcaccgtcctgttgcttagagccggattctatgccgtcagcttcctgtccgtggctgtggggtctacagtgtattaccagggaaaatgtctcacctggaaaggccccagacgccagcttccagctgttgttcctgctccactgccaccaccttgtggctcctctgctcacttgcttccaccagtgcctggcggacgcgccaagagaagcggatctggcgtgaagcagaccctgaatttcgacctgctgaagctggctggcgacgtggaatccaacccaggcccttctagaggccatatgaccgagtacaagcccacggtgcgcctcgccacccgcgacgacgtccccagggccgtacgcaccctcgccgccgcgttcgccgactaccccgccacgcgccacaccgtcgatccggaccgccacatcgagcgggtcaccgagctgcaagaactcttcctcacgcgcgtcgggctcgacatcggcaaggtgtgggtcgcggacgacggcgccgcggtggcggtctggaccacgccggagagcgtcgaagcgggggcggtgttcgccgagatcggcccgcgcatggccgagttgagcggttcccggctggccgcgcagcaacagatggaaggcctcctggcgccgcaccggcccaaggagcccgcgtggttcctggccaccgtcggcgtctcgcccgaccaccagggcaagggtctgggcagcgccgtcgtgctccccggagtggaggcggccgagcgcgccggggtgcccgccttcctggagacctccgcgccccgcaacctccccttctacgagcggctcggcttcaccgtcaccgccgacgtcgaggtgcccgaaggaccgcgcacctggtgcatgacccgcaagcccggtgcctga

SEQ ID NO: 9266 - DNA, 2997 bp, Artificial Sequence
  Synthetic Polynucleotide
atggccttaccagtgaccgccttgctcctgccgctggccttgctgctccacgccgccaggccggacatccagatgacacagagccctagcagcctgtctgccagcgtgggagacagagtgaccatcacatgcaaggccagcgaccacatcaacaactggctggcctggtatcagcagaagcctggacaggcccctaagctgctgatctacggcgctaccacactggaaacaggcgtgcccagcagattttctggcagcggctctggcaccgactacaccctgacaatatccagcctccagcctgaggacttcgccacctactactgtcagcagagctggaacaccccttggacattcggccagggcaccaagctggaaatcaagagactcgaggacctgaagaacgtgttcccacctgaggtggccgtgttcgagcctagcgaggccgagatcagccacacccagaaagccaccctcgtgtgcctggctaccggcttctaccccgaccatgtggaactgtcttggtgggtcaacggcaaagaggtgcacagcggcgtgtctaccgacccccagccactgaaagaacagcccgccctgaacgacagccggtactgcctgagcagcagactgagagtgtccgccaccttctggcagaacccccggaaccacttcagatgccaggtgcagttctacggcctgagcgagaacgacgagtggacccaggacagagccaagcccgtgacccagatcgtgtctgccgaagcctggggcagagccgattgcggatcccagagcttcggcctgctggaccccaagctgtgctacctgctggatggcatcctgttcatctacggcgtgatcctgaccgccctgttcctgagagtgaagttcagcagaagcgccgacgcccctgcctaccagcagggacagaaccaactgtacaacgagctgaacctgggcagacgggaagagtacgacgtgctggacaagcggagaggcagggaccctgagatgggcggaaagccccagcggagaaagaacccccaggaaggactgtataacgaactccagaaagacaagatggccgaagcctacagcgagatcggcatgaagggcgagcggagaagaggcaagggccacgatggcctgtaccagggcctgagcaccgccaccaaggacacctatgacgccctgcacatgcaggccctgcctccaagaagggccaagcgatctggatctggagcaacaaacttctcactactcaaacaagcaggtgacgtggaggagaatcccgggcctactagtatggactggatttggcgcatccttttccttgtcggcgctgctaccggcgcgcattccttcgaacaagttcagcttcaacagcctggcgctgagctggtcaaacctggcgcttctgtgaagatgagctgcaaagccagcggctacgccttcagcagctactggatcaactggatgaagcagaaacccggccagggactcgaatggatcggccaaatctatcccggcgacggcgacaccaactacaacggcaagttcaagggcagagccacactgaccgccgatacctctagcagcacagcctacatgcagctgagcagcctgaccagcgaagatagcgccgtgtacttctgtgcccggtccatcacaacagtcgtgggctgcgctatggactattggggccagggaacaagcgtgaccgtgtctagtacgcgtatccagaaccctgatcctgccgtgtaccagctgcgggatagcaagagcagcgacaagagcgtgtgtctgttcaccgacttcgacagccagaccaacgtgtcccagagcaaggactccgacgtgtacatcaccgataagaccgtgctggacatgcggagcatggacttcaagagcaactccgccgtggcctggtccaacaagtccgatttcgcctgcgccaacgccttcaacaacagcattatccccgaggacacattcttcccaagccccgagagcagctgcggtaccggcgacatcgagaacaccagtctggcccctgaggaccctacctttcctgccgatacctggggcacctacctgctgaccacagagacaggactccagaaagatcacgccctgtgggaccacacagcccagaacctgctgagaatgggcctcgcctttctggtgctggttgccctcgtgtggttcctggtggaagattggctgagccggaagcggacaagagagagagccagcagagcctctacctgggagggaagaagaaggctgaacacccagacacttagggccaagcgatctggatctggagcaacaaacttctcactactcaaacaagcaggtgacgtggaggagaatcccgggccttctagaggccatatgaccgagtacaagcccacggtgcgcctcgccacccgcgacgacgtccccagggccgtacgcaccctcgccgccgcgttcgccgactaccccgccacgcgccacaccgtcgatccggaccgccacatcgagcgggtcaccgagctgcaagaactcttcctcacgcgcgtcgggctcgacatcggcaaggtgtgggtcgcggacgacggcgccgcggtggcggtctggaccacgccggagagcgtcgaagcgggggcggtgttcgccgagatcggcccgcgcatggccgagttgagcggttcccggctggccgcgcagcaacagatggaaggcctcctggcgccgcaccggcccaaggagcccgcgtggttcctggccaccgtcggcgtctcgcccgaccaccagggcaagggtctgggcagcgccgtcgtgctccccggagtggaggcggccgagcgcgccggggtgcccgccttcctggagacctccgcgccccgcaacctccccttctacgagcggctcggcttcaccgtcaccgccgacgtcgaggtgcccgaaggaccgcgcacctggtgcatgacccgcaagcccggtgcctga

SEQ ID NO: 9267 - DNA, 3195 bp, Artificial Sequence
  Synthetic Polynucleotide
atggccttaccagtgaccgccttgctcctgccgctggccttgctgctccacgccgccaggccggacatccagatgacacagagccctagcagcctgtctgccagcgtgggagacagagtgaccatcacatgcaaggccagcgaccacatcaacaactggctggcctggtatcagcagaagcctggacaggcccctaagctgctgatctacggcgctaccacactggaaacaggcgtgcccagcagattttctggcagcggctctggcaccgactacaccctgacaatatccagcctccagcctgaggacttcgccacctactactgtcagcagagctggaacaccccttggacattcggccagggcaccaagctggaaatcaagagactcgaggacctgaagaacgtgttcccacctgaggtggccgtgttcgagcctagcgaggccgagatcagccacacccagaaagccaccctcgtgtgcctggctaccggcttctaccccgaccatgtggaactgtcttggtgggtcaacggcaaagaggtgcacagcggcgtgtctaccgacccccagccactgaaagaacagcccgccctgaacgacagccggtactgcctgagcagcagactgagagtgtccgccaccttctggcagaacccccggaaccacttcagatgccaggtgcagttctacggcctgagcgagaacgacgagtggacccaggacagagccaagcccgtgacccagatcgtgtctgccgaagcctggggcagagccgattgcggatcccagagcttcggcctgctggaccccaagctgtgctacctgctggatggcatcctgttcatctacggcgtgatcctgaccgccctgttcctgagagtgaagttcagcagaagcgccgacgcccctgcctaccagcagggacagaaccaactgtacaacgagctgaacctgggcagacgggaagagtacgacgtgctggacaagcggagaggcagggaccctgagatgggcggaaagccccagcggagaaagaacccccaggaaggactgtataacgaactccagaaagacaagatggccgaagcctacagcgagatcggcatgaagggcgagcggagaagaggcaagggccacgatggcctgtaccagggcctgagcaccgccaccaaggacacctatgacgccctgcacatgcaggccctgcctccaagaagggccaagcgatctggatctggagcaacaaacttctcactactcaaacaagcaggtgacgtggaggagaatcccgggcctactagtatggactggatttggcgcatccttttccttgtcggcgctgctaccggcgcgcattccttcgaacaagttcagcttcaacagcctggcgctgagctggtcaaacctggcgcttctgtgaagatgagctgcaaagccagcggctacgccttcagcagctactggatcaactggatgaagcagaaacccggccagggactcgaatggatcggccaaatctatcccggcgacggcgacaccaactacaacggcaagttcaagggcagagccacactgaccgccgatacctctagcagcacagcctacatgcagctgagcagcctgaccagcgaagatagcgccgtgtacttctgtgcccggtccatcacaacagtcgtgggctgcgctatggactattggggccagggaacaagcgtgaccgtgtctagtacgcgtatccagaaccctgatcctgccgtgtaccagctgcgggatagcaagagcagcgacaagagcgtgtgtctgttcaccgacttcgacagccagaccaacgtgtcccagagcaaggactccgacgtgtacatcaccgataagaccgtgctggacatgcggagcatggacttcaagagcaactccgccgtggcctggtccaacaagtccgatttcgcctgcgccaacgccttcaacaacagcattatccccgaggacacattcttcccaagccccgagagcagctgcggtaccaagtctgtgcgcttttacctggtcgtcagccctgccagtgcctccactcagacatcttggaccccaagggaccttgtgtcctctcagacacagacacagtcctgcgtgccaccaactgctggcgcaagacaggctccagagtctcccagcacaatccccgtcccttctcagccccagaactccacacttaggccaggaccagctgctccaatcgcactggtcccagtgttctgcggactgctggttgccaagtctctggtgctgagcgcactcctcgtttggtggggcgatatttggtggaaaacgatgatggaattgagatccctcgatacgcagaaagccacatgccaccttcagcaagtcacagacttgccttggaccagcgtcagctctcccgtggaacgggaaattctgtatcatacagtggcccgcaccaagatttccgacgatgacgacgagcacacactgcgcgccaagagaagcggatctggcgtgaagcagaccctgaatttcgacctgctgaagctggctggcgacgtggaatccaacccaggcccttctagaggccatatgaccgagtacaagcccacggtgcgcctcgccacccgcgacgacgtccccagggccgtacgcaccctcgccgccgcgttcgccgactaccccgccacgcgccacaccgtcgatccggaccgccacatcgagcgggtcaccgagctgcaagaactcttcctcacgcgcgtcgggctcgacatcggcaaggtgtgggtcgcggacgacggcgccgcggtggcggtctggaccacgccggagagcgtcgaagcgggggcggtgttcgccgagatcggcccgcgcatggccgagttgagcggttcccggctggccgcgcagcaacagatggaaggcctcctggcgccgcaccggcccaaggagcccgcgtggttcctggccaccgtcggcgtctcgcccgaccaccagggcaagggtctgggcagcgccgtcgtgctccccggagtggaggcggccgagcgcgccggggtgcccgccttcctggagacctccgcgccccgcaacctccccttctacgagcggctcggcttcaccgtcaccgccgacgtcgaggtgcccgaaggaccgcgcacctggtgcatgacccgcaagcccggtgcctga

SEQ ID NO: 9268 - DNA, 2955 bp, Artificial Sequence
  Synthetic Polynucleotide
atggccttaccagtgaccgccttgctcctgccgctggccttgctgctccacgccgccaggccggacatccagatgacacagagccctagcagcctgtctgccagcgtgggagacagagtgaccatcacatgcaaggccagcgaccacatcaacaactggctggcctggtatcagcagaagcctggacaggcccctaagctgctgatctacggcgctaccacactggaaacaggcgtgcccagcagattttctggcagcggctctggcaccgactacaccctgacaatatccagcctccagcctgaggacttcgccacctactactgtcagcagagctggaacaccccttggacattcggccagggcaccaagctggaaatcaagagactcgaggacctgaagaacgtgttcccacctgaggtggccgtgttcgagcctagcgaggccgagatcagccacacccagaaagccaccctcgtgtgcctggctaccggcttctaccccgaccatgtggaactgtcttggtgggtcaacggcaaagaggtgcacagcggcgtgtctaccgacccccagccactgaaagaacagcccgccctgaacgacagccggtactgcctgagcagcagactgagagtgtccgccaccttctggcagaacccccggaaccacttcagatgccaggtgcagttctacggcctgagcgagaacgacgagtggacccaggacagagccaagcccgtgacccagatcgtgtctgccgaagcctggggcagagccgattgcggatcccagagcttcggcctgctggaccccaagctgtgctacctgctggatggcatcctgttcatctacggcgtgatcctgaccgccctgttcctgagagtgaagttcagcagaagcgccgacgcccctgcctaccagcagggacagaaccaactgtacaacgagctgaacctgggcagacgggaagagtacgacgtgctggacaagcggagaggcagggaccctgagatgggcggaaagccccagcggagaaagaacccccaggaaggactgtataacgaactccagaaagacaagatggccgaagcctacagcgagatcggcatgaagggcgagcggagaagaggcaagggccacgatggcctgtaccagggcctgagcaccgccaccaaggacacctatgacgccctgcacatgcaggccctgcctccaagaagggccaagcgatctggatctggagcaacaaacttctcactactcaaacaagcaggtgacgtggaggagaatcccgggcctactagtatggactggatttggcgcatccttttccttgtcggcgctgctaccggcgcgcattccttcgaacaagttcagcttcaacagcctggcgctgagctggtcaaacctggcgcttctgtgaagatgagctgcaaagccagcggctacgccttcagcagctactggatcaactggatgaagcagaaacccggccagggactcgaatggatcggccaaatctatcccggcgacggcgacaccaactacaacggcaagttcaagggcagagccacactgaccgccgatacctctagcagcacagcctacatgcagctgagcagcctgaccagcgaagatagcgccgtgtacttctgtgcccggtccatcacaacagtcgtgggctgcgctatggactattggggccagggaacaagcgtgaccgtgtctagtacgcgtatccagaaccctgatcctgccgtgtaccagctgcgggatagcaagagcagcgacaagagcgtgtgtctgttcaccgacttcgacagccagaccaacgtgtcccagagcaaggactccgacgtgtacatcaccgataagaccgtgctggacatgcggagcatggacttcaagagcaactccgccgtggcctggtccaacaagtccgatttcgcctgcgccaacgccttcaacaacagcattatccccgaggacacattcttcccaagccccgagagcagctgcggtaccgtggtcgagaaagaacatccacagcttggcgctggcaccgtcctgttgcttagagccggattctatgccgtcagcttcctgtccgtggctgtggggtctacagtgtattaccagggaaaatgtctcacctggaaaggccccagacgccagcttccagctgttgttcctgctccactgccaccaccttgtggctcctctgctcacttgcttccaccagtgcctggcggacgcgccaagagaagcggatctggcgtgaagcagaccctgaatttcgacctgctgaagctggctggcgacgtggaatccaacccaggcccttctagaggccatatgaccgagtacaagcccacggtgcgcctcgccacccgcgacgacgtccccagggccgtacgcaccctcgccgccgcgttcgccgactaccccgccacgcgccacaccgtcgatccggaccgccacatcgagcgggtcaccgagctgcaagaactcttcctcacgcgcgtcgggctcgacatcggcaaggtgtgggtcgcggacgacggcgccgcggtggcggtctggaccacgccggagagcgtcgaagcgggggcggtgttcgccgagatcggcccgcgcatggccgagttgagcggttcccggctggccgcgcagcaacagatggaaggcctcctggcgccgcaccggcccaaggagcccgcgtggttcctggccaccgtcggcgtctcgcccgaccaccagggcaagggtctgggcagcgccgtcgtgctccccggagtggaggcggccgagcgcgccggggtgcccgccttcctggagacctccgcgccccgcaacctccccttctacgagcggctcggcttcaccgtcaccgccgacgtcgaggtgcccgaaggaccgcgcacctggtgcatgacccgcaagcccggtgcctga

SEQ ID NO: 9269 - DNA, 2868 bp, Artificial Sequence
  Synthetic Polynucleotide
atggccttaccagtgaccgccttgctcctgccgctggccttgctgctccacgccgccaggccggacatccagatgacacagagccctagcagcctgtctgccagcgtgggagacagagtgaccatcacatgcaaggccagcgaccacatcaacaactggctggcctggtatcagcagaagcctggacaggcccctaagctgctgatctacggcgctaccacactggaaacaggcgtgcccagcagattttctggcagcggctctggcaccgactacaccctgacaatatccagcctccagcctgaggacttcgccacctactactgtcagcagagctggaacaccccttggacattcggccagggcaccaagctggaaatcaagagactcgagggacagcctaaggccaatcctaccgtgacactgttccctccaagcagcgaagaactccaggccaacaaggccacacttgtgtgcctgatctccgacttctaccctggggctgtgacagtggcttggaaggccgatggatctcctgtgaaagccggcgtggaaaccaccaagccatccaagcagagcaacaacaaatacgccgccagctcctacctgagcctgacacctgagcagtggaagtcccacagatcctacagctgccaagtgacccacgaaggcagcaccgtggaaaagacagtggcccctacagagtgcagcggatcccagagcttcggcctgctggaccccaagctgtgctacctgctggatggcatcctgttcatctacggcgtgatcctgaccgccctgttcctgagagtgaagttcagcagaagcgccgacgcccctgcctaccagcagggacagaaccaactgtacaacgagctgaacctgggcagacgggaagagtacgacgtgctggacaagcggagaggcagggaccctgagatgggcggaaagccccagcggagaaagaacccccaggaaggactgtataacgaactccagaaagacaagatggccgaagcctacagcgagatcggcatgaagggcgagcggagaagaggcaagggccacgatggcctgtaccagggcctgagcaccgccaccaaggacacctatgacgccctgcacatgcaggccctgcctccaagaagggccaagcgatctggatctggagcaacaaacttctcactactcaaacaagcaggtgacgtggaggagaatcccgggcctactagtatggactggatttggcgcatccttttccttgtcggcgctgctaccggcgcgcattccttcgaacaagttcagcttcaacagcctggcgctgagctggtcaaacctggcgcttctgtgaagatgagctgcaaagccagcggctacgccttcagcagctactggatcaactggatgaagcagaaacccggccagggactcgaatggatcggccaaatctatcccggcgacggcgacaccaactacaacggcaagttcaagggcagagccacactgaccgccgatacctctagcagcacagcctacatgcagctgagcagcctgaccagcgaagatagcgccgtgtacttctgtgcccggtccatcacaacagtcgtgggctgcgctatggactattggggccagggaacaagcgtgaccgtgtctagtacgcgtgcctctacaaagggaccctccgtgtttcctctggctcccagcagcaagtctacaagcggaggaacagccgctctgggctgcctggtcaaggattactttcccgagcctgtgaccgtgtcctggaatagcggagcactgacaagcggcgtgcacacctttccagccgtgctgcaaagcagcggcctgtactctctgagcagcgtggtcacagtgcctagctctagcctgggcacccagacctacatctgcaatgtgaaccacaagcctagcaacaccaaggtggacaagagagtggaacccaagagctgtggtaccatcactcaaggtttggcagtgtcaaccatctcatcattctttccacctggctaccaagtgtccttctgcctggtcatggtgctgctgttcgccgtggataccggcctgtacttcagcgtcaagaccaacatccggtccagcaccagagactggaaggaccacaagttcaagtggcggaaggaccctcaggacaagagggccaagcgatctggatctggagcaacaaacttctcactactcaaacaagcaggtgacgtggaggagaatcccgggccttctagaggccatatgaccgagtacaagcccacggtgcgcctcgccacccgcgacgacgtccccagggccgtacgcaccctcgccgccgcgttcgccgactaccccgccacgcgccacaccgtcgatccggaccgccacatcgagcgggtcaccgagctgcaagaactcttcctcacgcgcgtcgggctcgacatcggcaaggtgtgggtcgcggacgacggcgccgcggtggcggtctggaccacgccggagagcgtcgaagcgggggcggtgttcgccgagatcggcccgcgcatggccgagttgagcggttcccggctggccgcgcagcaacagatggaaggcctcctggcgccgcaccggcccaaggagcccgcgtggttcctggccaccgtcggcgtctcgcccgaccaccagggcaagggtctgggcagcgccgtcgtgctccccggagtggaggcggccgagcgcgccggggtgcccgccttcctggagacctccgcgccccgcaacctccccttctacgagcggctcggcttcaccgtcaccgccgacgtcgaggtgcccgaaggaccgcgcacctggtgcatgacccgcaagcccggtgcctga

SEQ ID NO: 9270 - DNA, 2913 bp, Artificial Sequence
  Synthetic Polynucleotide
atggccttaccagtgaccgccttgctcctgccgctggccttgctgctccacgccgccaggccggacatccagatgacacagagccctagcagcctgtctgccagcgtgggagacagagtgaccatcacatgcaaggccagcgaccacatcaacaactggctggcctggtatcagcagaagcctggacaggcccctaagctgctgatctacggcgctaccacactggaaacaggcgtgcccagcagattttctggcagcggctctggcaccgactacaccctgacaatatccagcctccagcctgaggacttcgccacctactactgtcagcagagctggaacaccccttggacattcggccagggcaccaagctggaaatcaagagactcgaggacctgaagaacgtgttcccacctgaggtggccgtgttcgagcctagcgaggccgagatcagccacacccagaaagccaccctcgtgtgcctggctaccggcttctaccccgaccatgtggaactgtcttggtgggtcaacggcaaagaggtgcacagcggcgtgtctaccgacccccagccactgaaagaacagcccgccctgaacgacagccggtactgcctgagcagcagactgagagtgtccgccaccttctggcagaacccccggaaccacttcagatgccaggtgcagttctacggcctgagcgagaacgacgagtggacccaggacagagccaagcccgtgacccagatcgtgtctgccgaagcctggggcagagccgattgcggatcccagagcttcggcctgctggaccccaagctgtgctacctgctggatggcatcctgttcatctacggcgtgatcctgaccgccctgttcctgagagtgaagttcagcagaagcgccgacgcccctgcctaccagcagggacagaaccaactgtacaacgagctgaacctgggcagacgggaagagtacgacgtgctggacaagcggagaggcagggaccctgagatgggcggaaagccccagcggagaaagaacccccaggaaggactgtataacgaactccagaaagacaagatggccgaagcctacagcgagatcggcatgaagggcgagcggagaagaggcaagggccacgatggcctgtaccagggcctgagcaccgccaccaaggacacctatgacgccctgcacatgcaggccctgcctccaagaagggccaagcgatctggatctggagcaacaaacttctcactactcaaacaagcaggtgacgtggaggagaatcccgggcctactagtatggactggatttggcgcatccttttccttgtcggcgctgctaccggcgcgcattccttcgaacaagttcagcttcaacagcctggcgctgagctggtcaaacctggcgcttctgtgaagatgagctgcaaagccagcggctacgccttcagcagctactggatcaactggatgaagcagaaacccggccagggactcgaatggatcggccaaatctatcccggcgacggcgacaccaactacaacggcaagttcaagggcagagccacactgaccgccgatacctctagcagcacagcctacatgcagctgagcagcctgaccagcgaagatagcgccgtgtacttctgtgcccggtccatcacaacagtcgtgggctgcgctatggactattggggccagggaacaagcgtgaccgtgtctagtacgcgtatccagaaccctgatcctgccgtgtaccagctgcgggatagcaagagcagcgacaagagcgtgtgtctgttcaccgacttcgacagccagaccaacgtgtcccagagcaaggactccgacgtgtacatcaccgataagaccgtgctggacatgcggagcatggacttcaagagcaactccgccgtggcctggtccaacaagtccgatttcgcctgcgccaacgccttcaacaacagcattatccccgaggacacattcttcccaagccccgagagcagctgcggtaccatcactcaaggtttggcagtgtcaaccatctcatcattctttccacctggctaccaagtgtccttctgcctggtcatggtgctgctgttcgccgtggataccggcctgtacttcagcgtcaagaccaacatccggtccagcaccagagactggaaggaccacaagttcaagtggcggaaggaccctcaggacaagagggccaagcgatctggatctggagcaacaaacttctcactactcaaacaagcaggtgacgtggaggagaatcccgggccttctagaggccatatgaccgagtacaagcccacggtgcgcctcgccacccgcgacgacgtccccagggccgtacgcaccctcgccgccgcgttcgccgactaccccgccacgcgccacaccgtcgatccggaccgccacatcgagcgggtcaccgagctgcaagaactcttcctcacgcgcgtcgggctcgacatcggcaaggtgtgggtcgcggacgacggcgccgcggtggcggtctggaccacgccggagagcgtcgaagcgggggcggtgttcgccgagatcggcccgcgcatggccgagttgagcggttcccggctggccgcgcagcaacagatggaaggcctcctggcgccgcaccggcccaaggagcccgcgtggttcctggccaccgtcggcgtctcgcccgaccaccagggcaagggtctgggcagcgccgtcgtgctccccggagtggaggcggccgagcgcgccggggtgcccgccttcctggagacctccgcgccccgcaacctccccttctacgagcggctcggcttcaccgtcaccgccgacgtcgaggtgcccgaaggaccgcgcacctggtgcatgacccgcaagcccggtgcctga

SEQ ID NO: 9271 - DNA, 1080 bp, Artificial Sequence
  Synthetic Polynucleotide
atggccttaccagtgaccgccttgctcctgccgctggccttgctgctccacgccgccaggccggacatccagatgacacagagccctagcagcctgtctgccagcgtgggagacagagtgaccatcacatgcaaggccagcgaccacatcaacaactggctggcctggtatcagcagaagcctggacaggcccctaagctgctgatctacggcgctaccacactggaaacaggcgtgcccagcagattttctggcagcggctctggcaccgactacaccctgacaatatccagcctccagcctgaggacttcgccacctactactgtcagcagagctggaacaccccttggacattcggccagggcaccaagctggaaatcaagagaggcggaggcggaagtggaggcggaggatctggcggcggaggctctcaagttcagcttcaacagcctggcgctgagctggtcaaacctggcgcttctgtgaagatgagctgcaaagccagcggctacgccttcagcagctactggatcaactggatgaagcagaaacccggccagggactcgaatggatcggccaaatctatcccggcgacggcgacaccaactacaacggcaagttcaagggcagagccacactgaccgccgatacctctagcagcacagcctacatgcagctgagcagcctgaccagcgaagatagcgccgtgtacttctgtgcccggtccatcacaacagtcgtgggctgcgctatggactattggggccagggaacaagcgtgaccgtgtctagtacgcgtaaaattgaagttatgtatcctcctccttacctagacaatgagaagagcaatggaaccattatccatgtgaaaggggcgcgtatcacccagggcctggccgtgtctaccatcagcagctttttcccacccggctaccaggtgtccttctgcctcgtgatggtgctgctgttcgccgtggacaccggcctgtacttcagcgtgaaaacaaacatccggtccagcaccagagactggaaggaccacaagttcaagtggcggaaggacccccaggacaagtga

SEQ ID NO: 9272 - DNA, 2970 bp, Artificial Sequence
  Synthetic Polynucleotide
atggccttaccagtgaccgccttgctcctgccgctggccttgctgctccacgccgccaggccggacatccagatgacacagagccctagcagcctgtctgccagcgtgggagacagagtgaccatcacatgcaaggccagcgaccacatcaacaactggctggcctggtatcagcagaagcctggacaggcccctaagctgctgatctacggcgctaccacactggaaacaggcgtgcccagcagattttctggcagcggctctggcaccgactacaccctgacaatatccagcctccagcctgaggacttcgccacctactactgtcagcagagctggaacaccccttggacattcggccagggcaccaagctggaaatcaagagactcgaggacctgaagaacgtgttcccacctgaggtggccgtgttcgagcctagcgaggccgagatcagccacacccagaaagccaccctcgtgtgcctggctaccggcttctaccccgaccatgtggaactgtcttggtgggtcaacggcaaagaggtgcacagcggcgtgtctaccgacccccagccactgaaagaacagcccgccctgaacgacagccggtactgcctgagcagcagactgagagtgtccgccaccttctggcagaacccccggaaccacttcagatgccaggtgcagttctacggcctgagcgagaacgacgagtggacccaggacagagccaagcccgtgacccagatcgtgtctgccgaagcctggggcagagccgattgcggatcccagagcttcggcctgctggaccccaagctgtgctacctgctggatggcatcctgttcatctacggcgtgatcctgaccgccctgttcctgagagtgaagttcagcagaagcgccgacgcccctgcctaccagcagggacagaaccaactgtacaacgagctgaacctgggcagacgggaagagtacgacgtgctggacaagcggagaggcagggaccctgagatgggcggaaagccccagcggagaaagaacccccaggaaggactgtataacgaactccagaaagacaagatggccgaagcctacagcgagatcggcatgaagggcgagcggagaagaggcaagggccacgatggcctgtaccagggcctgagcaccgccaccaaggacacctatgacgccctgcacatgcaggccctgcctccaagaagggccaagcgatctggatctggagcaacaaacttctcactactcaaacaagcaggtgacgtggaggagaatcccgggcctactagtatggactggatttggcgcatccttttccttgtcggcgctgctaccggcgcgcattccttcgaacaagttcagcttcaacagcctggcgctgagctggtcaaacctggcgcttctgtgaagatgagctgcaaagccagcggctacgccttcagcagctactggatcaactggatgaagcagaaacccggccagggactcgaatggatcggccaaatctatcccggcgacggcgacaccaactacaacggcaagttcaagggcagagccacactgaccgccgatacctctagcagcacagcctacatgcagctgagcagcctgaccagcgaagatagcgccgtgtacttctgtgcccggtccatcacaacagtcgtgggctgcgctatggactattggggccagggaacaagcgtgaccgtgtctagtacgcgtgcctctacaaagggaccctccgtgtttcctctggctcccagcagcaagtctacaagcggaggaacagccgctctgggctgcctggtcaaggattactttcccgagcctgtgaccgtgtcctggaatagcggagcactgacaagcggcgtgcacacctttccagccgtgctgcaaagcagcggcctgtactctctgagcagcgtggtcacagtgcctagctctagcctgggcacccagacctacatctgcaatgtgaaccacaagcctagcaacaccaaggtggacaagagagtggaacccaagagctgtacaacgccgggcgaaaggagttccttgccggccttttaccccggcacaagcggaagctgtagtgggtgtggaagcctcagcctcccacttcttgcgggcctcgtcgcggcagatgcagtagcttcacttcttattgtaggcgcggtatttctctgtgctcgaccaaggaggtcacccgctcaggaggatggtaaggtgtatataaatatgccaggacgcggacgcgccaagagaagcggatctggcgtgaagcagaccctgaatttcgacctgctgaagctggctggcgacgtggaatccaacccaggcccttctagaggccatatgaccgagtacaagcccacggtgcgcctcgccacccgcgacgacgtccccagggccgtacgcaccctcgccgccgcgttcgccgactaccccgccacgcgccacaccgtcgatccggaccgccacatcgagcgggtcaccgagctgcaagaactcttcctcacgcgcgtcgggctcgacatcggcaaggtgtgggtcgcggacgacggcgccgcggtggcggtctggaccacgccggagagcgtcgaagcgggggcggtgttcgccgagatcggcccgcgcatggccgagttgagcggttcccggctggccgcgcagcaacagatggaaggcctcctggcgccgcaccggcccaaggagcccgcgtggttcctggccaccgtcggcgtctcgcccgaccaccagggcaagggtctgggcagcgccgtcgtgctccccggagtggaggcggccgagcgcgccggggtgcccgccttcctggagacctccgcgccccgcaacctccccttctacgagcggctcggcttcaccgtcaccgccgacgtcgaggtgcccgaaggaccgcgcacctggtgcatgacccgcaagcccggtgcctga

SEQ ID NO: 9273 - DNA, 1446 bp, Artificial Sequence
  Synthetic Polynucleotide
atgggctggatcagaggcagaagaagcagacacagctgggagatgagcgagttccacaactacaacctggacctgaagaagtccgacttcagcacccggtggcagaaacagagatgccccgtggtcaagagcaagtgcagagagaacgcaagccccttcttcttctgttgctttatcgccgtggctatgggcatccgcttcatcatcatggtggctatttggagcgccgtgttcctgaactccctgttcaatcaagaggtgcagatccctctgaccgagagctactgtggcccctgtcctaagaactggatctgctacaagaacaactgctaccagttcttcgacgagagcaagaattggtacgagagccaggccagctgcatgagccagaatgccagcctgctgaaggtgtacagcaaagaggaccaggacctgctgaaactggtcaagtcctaccactggatgggccttgtgcacatccccaccaatggctcttggcagtgggaggacggcagcattctgagccctaacctgctgaccatcatcgagatgcagaagggcgactgcgccctgtacgccagcagctttaagggctacatcgagaattgcagcaccccgaacacctacatctgtatgcagagaaccgttggcggaggcggatctggcggcggaggtagcggtggcggaggatctgaattcgacatcgtgatgacacagagccccgccacactgtcactgtctccaggcgaaagagccacactgagctgtcggagcagcaagagcctccagaacgtgaacggcaacacctacctgtactggttccagcagaagcccggccagtctcctcagctcctgatctacagaatgagcaacctgaacagcggcgtgcccgacagattttctggcagcggaagcggcaccgagttcaccctgaccataagcagcctggaacctgaggacttcgccgtgtactactgtatgcagcacctggaataccccatcaccttcggagccggcaccaagctggaaatcaaaggcggaggcggaagtggaggcggaggatctggcggcggaggctctgaagtgcaactggttgaatctggcggcggactggttaagcctggcggatctctgaagctgagctgtgccgccagcggctacacctttaccagctacgtgatgcactgggtccgacaggcccctggcaaaggacttgagtggatcggctacatcaacccctacaacgatggcaccaagtacaacgagaagttccagggcagagtgaccatcagctccgacaagagcatcagcaccgcctacatggaactgagcagcctgagaagcgaggataccgccatgtactattgcgccagaggcacctactactacggcaccagagtgttcgactactggggccagggaaccctggtcacagtctcttcttaa

SEQ ID NO: 9274 - DNA, 1434 bp, Artificial Sequence
  Synthetic Polynucleotide
atgggctggatcagaggcagaagaagcagacacagctgggagatgagcgagttccacaactacaacctggacctgaagaagtccgacttcagcacccggtggcagaaacagagatgccccgtggtcaagagcaagtgcagagagaacgcaagccccttcttcttctgttgctttatcgccgtggctatgggcatccgcttcatcatcatggtggctatttggagcgccgtgttcctgaactccctgttcaatcaagaggtgcagatccctctgaccgagagctactgtggcccctgtcctaagaactggatctgctacaagaacaactgctaccagttcttcgacgagagcaagaattggtacgagagccaggccagctgcatgagccagaatgccagcctgctgaaggtgtacagcaaagaggaccaggacctgctgaaactggtcaagtcctaccactggatgggccttgtgcacatccccaccaatggctcttggcagtgggaggacggcagcattctgagccctaacctgctgaccatcatcgagatgcagaagggcgactgcgccctgtacgccagcagctttaagggctacatcgagaattgcagcaccccgaacacctacatctgtatgcagagaaccgttggcggaggcggatctggcggcggaggtagcggtggcggaggatctgaattcgacatccagatgacacagagccctagcagcctgtctgccagcgtgggagacagagtgaccatcacatgcaaggccagcgaccacatcaacaactggctggcctggtatcagcagaagcctggacaggcccctaagctgctgatctacggcgctaccacactggaaacaggcgtgcccagcagattttctggcagcggctctggcaccgactacaccctgacaatatccagcctccagcctgaggacttcgccacctactactgtcagcagagctggaacaccccttggacattcggccagggcaccaagctggaaatcaagagaggcggaggcggaagtggaggcggaggatctggcggcggaggctctcaagttcagcttcaacagcctggcgctgagctggtcaaacctggcgcttctgtgaagatgagctgcaaagccagcggctacgccttcagcagctactggatcaactggatgaagcagaaacccggccagggactcgaatggatcggccaaatctatcccggcgacggcgacaccaactacaacggcaagttcaagggcagagccacactgaccgccgatacctctagcagcacagcctacatgcagctgagcagcctgaccagcgaagatagcgccgtgtacttctgtgcccggtccatcacaacagtcgtgggctgcgctatggactattggggccagggaacaagcgtgaccgtgtctagttaa

SEQ ID NO: 9275 - DNA, 2322 bp, Artificial Sequence
  Synthetic Polynucleotide
atggccttaccagtgaccgccttgctcctgccgctggccttgctgctccacgccgccaggccggacatccagatgacacagagccctagcagcctgtctgccagcgtgggagacagagtgaccatcacatgcaaggccagcgaccacatcaacaactggctggcctggtatcagcagaagcctggacaggcccctaagctgctgatctacggcgctaccacactggaaacaggcgtgcccagcagattttctggcagcggctctggcaccgactacaccctgacaatatccagcctccagcctgaggacttcgccacctactactgtcagcagagctggaacaccccttggacattcggccagggcaccaagctggaaatcaagagaggcggaggcggaagtggaggcggaggatctggcggcggaggctctcaagttcagcttcaacagcctggcgctgagctggtcaaacctggcgcttctgtgaagatgagctgcaaagccagcggctacgccttcagcagctactggatcaactggatgaagcagaaacccggccagggactcgaatggatcggccaaatctatcccggcgacggcgacaccaactacaacggcaagttcaagggcagagccacactgaccgccgatacctctagcagcacagcctacatgcagctgagcagcctgaccagcgaagatagcgccgtgtacttctgtgcccggtccatcacaacagtcgtgggctgcgctatggactattggggccagggaacaagcgtgaccgtgtctagtacgcgtaaaattgaagttatgtatcctcctccttacctagacaatgagaagagcaatggaaccattatccatgtgaaaggggcgcgtaagtctgtgcgcttttacctggtcgtcagccctgccagtgcctccactcagacatcttggaccccaagggaccttgtgtcctctcagacacagacacagtcctgcgtgccaccaactgctggcgcaagacaggctccagagtctcccagcacaatccccgtcccttctcagccccagaactccacacttaggccaggaccagctgctccaatcgcactggtcccagtgttctgcggactgctggttgccaagtctctggtgctgagcgcactcctcgtttggtggggcgatatttggtggaaaacgatgatggaattgagatccctcgatacgcagaaagccacatgccaccttcagcaagtcacagacttgccttggaccagcgtcagctctcccgtggaacgggaaattctgtatcatacagtggcccgcaccaagatttccgacgatgacgacgagcacacactgcgcgccaagagaagcggatctggcgtgaagcagaccctgaatttcgacctgctgaagctggctggcgacgtggaatccaacccaggcccttctagaatgtaccggatgcagctgctgagctgtatcgccctgtctctggccctggtcacaaatagcgcccctaccagcagcagcaccaagaaaacccagctgcaactggaacacctcctgctggacctccagatgatcctgaacggcatcaacaactacaagaaccccaagctgacccggatgctgaccttcaagttctacatgcccaagaaggccaccgagctgaagcacctccagtgcctggaagaggaactgaagcccctggaagaagtgctgaatctggcccagagcaagaacttccacctgaggccaagggacctgatctccaacatcaacgtgatcgtgctggaactgaaaggcagcgagacaaccttcatgtgcgagtacgccgacgagacagctaccatcgtggaatttctgaatcggtggatcaccttctgccagagcatcatcagcaccctgacacatatgtgcccctacagcaatcctagcctgtgttctggcggcggaggaagcgaacttcctacacagggcaccttcagcaacgtgtccaccaatgtgtccccagccaagcctaccaccaccgcctgtccttactccaatccatctctgtgcagcggaggcggcggatctcctgctcctagacctcctacaccagctcctacaatcgccagccagcctctgtctctcagacccgaagcctgtagacctgctgctggcggagctgtgcataccagaggactggatttcgcctgcgacatctacatctgggctcctctggctggcacatgtggcgttctgctgctgagcctggtcatcaccctgtactgcaaccaccggaacaggcggagagtgtgcaagtgccctagacctgtggtttaa

SEQ ID NO: 9276 - DNA, 1992 bp, Artificial Sequence
  Synthetic Polynucleotide
atggactggatttggcgcatccttttccttgtcggcgctgctaccggcgcccattccgggcccgaagtgcagctggttgaatctggcggaggactggttcaggctggcggatctctgagactgtcttgtgccgccagcggcagaacctttagcatgggctggtttagacaggcccctggcaaagagagagagttcgtcgccgccatcacatactctggcggcagcccttactacgccgactctgtgaagggcagattcaccatcagccgggacaacgccaagaacaccgtgtacctccagatgaacagcctgaagcctgaggacaccgccgtgtactactgcgccgccaatccaacatacggcagcgactggaacgccgagaattggggccagggaacccaagtgacagtgtctagcggatccggcggcggaggatctggcggaggcggatctgggggcggaggctctttcgaaggcagcacgcgtactccagctgctccacctaaagctgtcctgaagctcgaacctcaatggattaacgtcctccaagaagattctgtcaccctgacatgccggggcacccactctccagagtctgattccattcagtggtttcataatgggaacctgattccgactcacacgcagcccagctatcggtttaaagctaacaacaatgactccggggagtatacttgccagacaggacagaccagcctgtctgacccagtgcacctgacagttctgagcgaatggctcgtcctgcagacccctcatcttgagttccaagagggcgaaaccattgtcctgagatgccactcctggaaagataagccccttgtgaaagtcacattttttcagaatggcaagagcaagaagttttctcggagcgatccgaatttcagtattccccaggccaaccactctcacagcggagactatcactgtacaggcaacatcgggtatacactctacagctctaagcccgtcacaattaccgttcaggctcccagcagctccccaatgggcattattgtggccgtcgtgaccggaattgctgtggccgcaatcgtggcagctgtcgtcgctctgatctattgcagaaagaagcggatcagcgccctgccagggtatcctgagtgccgcgaaatgggcgaaactctgcctgagaaacctgctaaccccacaaatcccgatgaagctgacaaagtcggcgctgaaaacacgatcacatactccctgctcatgcatcctgacgctcttgaggaacctgacgatcagaaccggatccgcgccaagagaagcggatctggcgtgaagcagaccctgaatttcgacctgctgaagctggctggcgacgtggaatccaacccaggcccttctagaggccatatgaccgagtacaagcccacggtgcgcctcgccacccgcgacgacgtccccagggccgtacgcaccctcgccgccgcgttcgccgactaccccgccacgcgccacaccgtcgatccggaccgccacatcgagcgggtcaccgagctgcaagaactcttcctcacgcgcgtcgggctcgacatcggcaaggtgtgggtcgcggacgacggcgccgcggtggcggtctggaccacgccggagagcgtcgaagcgggggcggtgttcgccgagatcggcccgcgcatggccgagttgagcggttcccggctggccgcgcagcaacagatggaaggcctcctggcgccgcaccggcccaaggagcccgcgtggttcctggccaccgtcggcgtctcgcccgaccaccagggcaagggtctgggcagcgccgtcgtgctccccggagtggaggcggccgagcgcgccggggtgcccgccttcctggagacctccgcgccccgcaacctccccttctacgagcggctcggcttcaccgtcaccgccgacgtcgaggtgcccgaaggaccgcgcacctggtgcatgacccgcaagcccggtgcctga

SEQ ID NO: 9277 - DNA, 3471 bp, Artificial Sequence
  Synthetic Polynucleotide
atggccttaccagtgaccgccttgctcctgccgctggccttgctgctccacgccgccaggccggacatccagatgacacagagccctagcagcctgtctgccagcgtgggagacagagtgaccatcacatgcaaggccagcgaccacatcaacaactggctggcctggtatcagcagaagcctggacaggcccctaagctgctgatctacggcgctaccacactggaaacaggcgtgcccagcagattttctggcagcggctctggcaccgactacaccctgacaatatccagcctccagcctgaggacttcgccacctactactgtcagcagagctggaacaccccttggacattcggccagggcaccaagctggaaatcaagagactcgagggacagcctaaggccaatcctaccgtgacactgttccctccaagcagcgaagaactccaggccaacaaggccacacttgtgtgcctgatctccgacttctaccctggggctgtgacagtggcttggaaggccgatggatctcctgtgaaagccggcgtggaaaccaccaagccatccaagcagagcaacaacaaatacgccgccagctcctacctgagcctgacacctgagcagtggaagtcccacagatcctacagctgccaagtgacccacgaaggcagcaccgtggaaaagacagtggcccctacagagtgcagcggatcccagagcttcggcctgctggaccccaagctgtgctacctgctggatggcatcctgttcatctacggcgtgatcctgaccgccctgttcctgagagtgaagttcagcagaagcgccgacgcccctgcctaccagcagggacagaaccaactgtacaacgagctgaacctgggcagacgggaagagtacgacgtgctggacaagcggagaggcagggaccctgagatgggcggaaagccccagcggagaaagaacccccaggaaggactgtataacgaactccagaaagacaagatggccgaagcctacagcgagatcggcatgaagggcgagcggagaagaggcaagggccacgatggcctgtaccagggcctgagcaccgccaccaaggacacctatgacgccctgcacatgcaggccctgcctccaagaagggccaagcgatctggatctggagcaacaaacttctcactactcaaacaagcaggtgacgtggaggagaatcccgggcctactagtatggactggatttggcgcatccttttccttgtcggcgctgctaccggcgcgcattccttcgaacaagttcagcttcaacagcctggcgctgagctggtcaaacctggcgcttctgtgaagatgagctgcaaagccagcggctacgccttcagcagctactggatcaactggatgaagcagaaacccggccagggactcgaatggatcggccaaatctatcccggcgacggcgacaccaactacaacggcaagttcaagggcagagccacactgaccgccgatacctctagcagcacagcctacatgcagctgagcagcctgaccagcgaagatagcgccgtgtacttctgtgcccggtccatcacaacagtcgtgggctgcgctatggactattggggccagggaacaagcgtgaccgtgtctagtacgcgtgcctctacaaagggaccctccgtgtttcctctggctcccagcagcaagtctacaagcggaggaacagccgctctgggctgcctggtcaaggattactttcccgagcctgtgaccgtgtcctggaatagcggagcactgacaagcggcgtgcacacctttccagccgtgctgcaaagcagcggcctgtactctctgagcagcgtggtcacagtgcctagctctagcctgggcacccagacctacatctgcaatgtgaaccacaagcctagcaacaccaaggtggacaagagagtggaacccaagagctgtggtacccagagttttgggttgttggaccctaaattgagctatctgttggacggaatcctgttcatttacggagtgatcctgaccgcattgttcctgtggcgacgcaagcgcaaagaaaagcaaagcgagacaagcccaaaagaatttctcactatatacgaggacgtgaaagatttgaagacgaggcggaatcatgagcaagagcagacatttcctggcgggggctctactatctactcaatgattcaatcccaaagctccgctccgacttcccaagagcccgcttacactctctactcactgatacagccttcaagaaaatcaggctctcggaaacggaatcattccccatccttcaatagtaccatctatgaagtaatcggtaagagtcaacctaaagctcaaaaccccgctcgcttgagccgcaaggagctggaaaacttcgatgtatatagctctagacgggttaagttttccagatccgcagacgcacccgcttaccaacaagggcagaaccaactctacaatgaacttaatttggggcggagggaagagtacgacgttctggacaaaaggaggggacgagatcccgagatgggcggaaagcctcagcgaaggaagaatccgcaagaggggctttataacgaactccagaaagataaaatggcagaagcctatagtgagattgggatgaagggagaaaggaggaggggtaaaggtcacgatgggttgtaccaaggattgagcacagccactaaagatacctatgatgcgctccacatgcaggccctgccgccaagacgcgccaagagaagcggatctggcgtgaagcagaccctgaatttcgacctgctgaagctggctggcgacgtggaatccaacccaggccctggccatatgaccgagtacaagcccacggtgcgcctcgccacccgcgacgacgtccccagggccgtacgcaccctcgccgccgcgttcgccgactaccccgccacgcgccacaccgtcgatccggaccgccacatcgagcgggtcaccgagctgcaagaactcttcctcacgcgcgtcgggctcgacatcggcaaggtgtgggtcgcggacgacggcgccgcggtggcggtctggaccacgccggagagcgtcgaagcgggggcggtgttcgccgagatcggcccgcgcatggccgagttgagcggttcccggctggccgcgcagcaacagatggaaggcctcctggcgccgcaccggcccaaggagcccgcgtggttcctggccaccgtcggcgtctcgcccgaccaccagggcaagggtctgggcagcgccgtcgtgctccccggagtggaggcggccgagcgcgccggggtgcccgccttcctggagacctccgcgccccgcaacctccccttctacgagcggctcggcttcaccgtcaccgccgacgtcgaggtgcccgaaggaccgcgcacctggtgcatgacccgcaagcccggtgcctga

SEQ ID NO: 9278 - DNA, 3516 bp, Artificial Sequence
  Synthetic Polynucleotide
atggccttaccagtgaccgccttgctcctgccgctggccttgctgctccacgccgccaggccggacatccagatgacacagagccctagcagcctgtctgccagcgtgggagacagagtgaccatcacatgcaaggccagcgaccacatcaacaactggctggcctggtatcagcagaagcctggacaggcccctaagctgctgatctacggcgctaccacactggaaacaggcgtgcccagcagattttctggcagcggctctggcaccgactacaccctgacaatatccagcctccagcctgaggacttcgccacctactactgtcagcagagctggaacaccccttggacattcggccagggcaccaagctggaaatcaagagactcgaggacctgaagaacgtgttcccacctgaggtggccgtgttcgagcctagcgaggccgagatcagccacacccagaaagccaccctcgtgtgcctggctaccggcttctaccccgaccatgtggaactgtcttggtgggtcaacggcaaagaggtgcacagcggcgtgtctaccgacccccagccactgaaagaacagcccgccctgaacgacagccggtactgcctgagcagcagactgagagtgtccgccaccttctggcagaacccccggaaccacttcagatgccaggtgcagttctacggcctgagcgagaacgacgagtggacccaggacagagccaagcccgtgacccagatcgtgtctgccgaagcctggggcagagccgattgcggatcccagagcttcggcctgctggaccccaagctgtgctacctgctggatggcatcctgttcatctacggcgtgatcctgaccgccctgttcctgagagtgaagttcagcagaagcgccgacgcccctgcctaccagcagggacagaaccaactgtacaacgagctgaacctgggcagacgggaagagtacgacgtgctggacaagcggagaggcagggaccctgagatgggcggaaagccccagcggagaaagaacccccaggaaggactgtataacgaactccagaaagacaagatggccgaagcctacagcgagatcggcatgaagggcgagcggagaagaggcaagggccacgatggcctgtaccagggcctgagcaccgccaccaaggacacctatgacgccctgcacatgcaggccctgcctccaagaagggccaagcgatctggatctggagcaacaaacttctcactactcaaacaagcaggtgacgtggaggagaatcccgggcctactagtatggactggatttggcgcatccttttccttgtcggcgctgctaccggcgcgcattccttcgaacaagttcagcttcaacagcctggcgctgagctggtcaaacctggcgcttctgtgaagatgagctgcaaagccagcggctacgccttcagcagctactggatcaactggatgaagcagaaacccggccagggactcgaatggatcggccaaatctatcccggcgacggcgacaccaactacaacggcaagttcaagggcagagccacactgaccgccgatacctctagcagcacagcctacatgcagctgagcagcctgaccagcgaagatagcgccgtgtacttctgtgcccggtccatcacaacagtcgtgggctgcgctatggactattggggccagggaacaagcgtgaccgtgtctagtacgcgtatccagaaccctgatcctgccgtgtaccagctgcgggatagcaagagcagcgacaagagcgtgtgtctgttcaccgacttcgacagccagaccaacgtgtcccagagcaaggactccgacgtgtacatcaccgataagaccgtgctggacatgcggagcatggacttcaagagcaactccgccgtggcctggtccaacaagtccgatttcgcctgcgccaacgccttcaacaacagcattatccccgaggacacattcttcccaagccccgagagcagctgcggtacccagagttttgggttgttggaccctaaattgagctatctgttggacggaatcctgttcatttacggagtgatcctgaccgcattgttcctgtggcgacgcaagcgcaaagaaaagcaaagcgagacaagcccaaaagaatttctcactatatacgaggacgtgaaagatttgaagacgaggcggaatcatgagcaagagcagacatttcctggcgggggctctactatctactcaatgattcaatcccaaagctccgctccgacttcccaagagcccgcttacactctctactcactgatacagccttcaagaaaatcaggctctcggaaacggaatcattccccatccttcaatagtaccatctatgaagtaatcggtaagagtcaacctaaagctcaaaaccccgctcgcttgagccgcaaggagctggaaaacttcgatgtatatagctctagacgggttaagttttccagatccgcagacgcacccgcttaccaacaagggcagaaccaactctacaatgaacttaatttggggcggagggaagagtacgacgttctggacaaaaggaggggacgagatcccgagatgggcggaaagcctcagcgaaggaagaatccgcaagaggggctttataacgaactccagaaagataaaatggcagaagcctatagtgagattgggatgaagggagaaaggaggaggggtaaaggtcacgatgggttgtaccaaggattgagcacagccactaaagatacctatgatgcgctccacatgcaggccctgccgccaagacgcgccaagagaagcggatctggcgtgaagcagaccctgaatttcgacctgctgaagctggctggcgacgtggaatccaacccaggccctggccatatgaccgagtacaagcccacggtgcgcctcgccacccgcgacgacgtccccagggccgtacgcaccctcgccgccgcgttcgccgactaccccgccacgcgccacaccgtcgatccggaccgccacatcgagcgggtcaccgagctgcaagaactcttcctcacgcgcgtcgggctcgacatcggcaaggtgtgggtcgcggacgacggcgccgcggtggcggtctggaccacgccggagagcgtcgaagcgggggcggtgttcgccgagatcggcccgcgcatggccgagttgagcggttcccggctggccgcgcagcaacagatggaaggcctcctggcgccgcaccggcccaaggagcccgcgtggttcctggccaccgtcggcgtctcgcccgaccaccagggcaagggtctgggcagcgccgtcgtgctccccggagtggaggcggccgagcgcgccggggtgcccgccttcctggagacctccgcgccccgcaacctccccttctacgagcggctcggcttcaccgtcaccgccgacgtcgaggtgcccgaaggaccgcgcacctggtgcatgacccgcaagcccggtgcctga

SEQ ID NO: 9279 - DNA, 3000 bp, Artificial Sequence
  Synthetic Polynucleotide
atggccttaccagtgaccgccttgctcctgccgctggccttgctgctccacgccgccaggccgcaggtgcagctggttgaatctggcggaggactggttcagcctggcggatctctgagactgtcttgtgccgccagcggcttcaccttcaccaatcacgccatgagctgggtccgacaggcccctggaaaaggactggaactggtgtctagcatcagcggcaacggcagaaccacctactacgccgatagcgtgaagggcagattcaccatcagccgggacatcagcaagaacaccctggacctccagatgaacagcctgagagccgaggataccgccgtgtactactgtgccaaggatggcggagagacactggtggatagcagaggccagggcacactggtcacagtgtcatctctcgaggacctgaagaacgtgttcccacctgaggtggccgtgttcgagcctagcgaggccgagatcagccacacccagaaagccaccctcgtgtgcctggctaccggcttctaccccgaccatgtggaactgtcttggtgggtcaacggcaaagaggtgcacagcggcgtgtctaccgacccccagccactgaaagaacagcccgccctgaacgacagccggtactgcctgagcagcagactgagagtgtccgccaccttctggcagaacccccggaaccacttcagatgccaggtgcagttctacggcctgagcgagaacgacgagtggacccaggacagagccaagcccgtgacccagatcgtgtctgccgaagcctggggcagagccgattgcggatcccagagcttcggcctgctggaccccaagctgtgctacctgctggatggcatcctgttcatctacggcgtgatcctgaccgccctgttcctgagagtgaagttcagcagaagcgccgacgcccctgcctaccagcagggacagaaccaactgtacaacgagctgaacctgggcagacgggaagagtacgacgtgctggacaagcggagaggcagggaccctgagatgggcggaaagccccagcggagaaagaacccccaggaaggactgtataacgaactccagaaagacaagatggccgaagcctacagcgagatcggcatgaagggcgagcggagaagaggcaagggccacgatggcctgtaccagggcctgagcaccgccaccaaggacacctatgacgccctgcacatgcaggccctgcctccaagaagggccaagcgatctggatctggagcaacaaacttctcactactcaaacaagcaggtgacgtggaggagaatcccgggcctactagtatggactggatttggcgcatccttttccttgtcggcgctgctaccggcgcgcattccttcgaagttcagttggtagagtctggaggcggagtggtacaaccggggcggtctcttagacttagttgcgcagcaagcggtttctctttctctggctatgggatgcactgggtgagacaggcccctgggaaaggactggagtgggtggcctacatttcatacgacgggagtaataaatactatgcagactccgttaagggcaggttcacgatctctcgggacaattccaagaatacattgtatcttcagatgaatagtctccgagctgaagacacggcggtttactactgcgctaaagacccggcctggggacttcgacttggagagagttctagctacgattttgacatttggggacaagggacaatggtcactgtctcaagtacgcgtatccagaaccctgatcctgccgtgtaccagctgcgggatagcaagagcagcgacaagagcgtgtgtctgttcaccgacttcgacagccagaccaacgtgtcccagagcaaggactccgacgtgtacatcaccgataagaccgtgctggacatgcggagcatggacttcaagagcaactccgccgtggcctggtccaacaagtccgatttcgcctgcgccaacgccttcaacaacagcattatccccgaggacacattcttcccaagccccgagagcagctgcggtaccgtggtcgagaaagaacatccacagcttggcgctggcaccgtcctgttgcttagagccggattctatgccgtcagcttcctgtccgtggctgtggggtctacagtgtattaccagggaaaatgtctcacctggaaaggccccagacgccagcttccagctgttgttcctgctccactgccaccaccttgtggctcctctgctcacttgcttccaccagtgcctggcggacgcgccaagagaagcggatctggcgtgaagcagaccctgaatttcgacctgctgaagctggctggcgacgtggaatccaacccaggcccttctagaggccatatgaccgagtacaagcccacggtgcgcctcgccacccgcgacgacgtccccagggccgtacgcaccctcgccgccgcgttcgccgactaccccgccacgcgccacaccgtcgatccggaccgccacatcgagcgggtcaccgagctgcaagaactcttcctcacgcgcgtcgggctcgacatcggcaaggtgtgggtcgcggacgacggcgccgcggtggcggtctggaccacgccggagagcgtcgaagcgggggcggtgttcgccgagatcggcccgcgcatggccgagttgagcggttcccggctggccgcgcagcaacagatggaaggcctcctggcgccgcaccggcccaaggagcccgcgtggttcctggccaccgtcggcgtctcgcccgaccaccagggcaagggtctgggcagcgccgtcgtgctccccggagtggaggcggccgagcgcgccggggtgcccgccttcctggagacctccgcgccccgcaacctccccttctacgagcggctcggcttcaccgtcaccgccgacgtcgaggtgcccgaaggaccgcgcacctggtgcatgacccgcaagcccggtgcctga

SEQ ID NO: 9280 - DNA, 3201 bp, Artificial Sequence
  Synthetic Polynucleotide
atggccttaccagtgaccgccttgctcctgccgctggccttgctgctccacgccgccaggccgcaggtgcagctggttgaatctggcggaggactggttcagcctggcggatctctgagactgtcttgtgccgccagcggcttcaccttcaccaatcacgccatgagctgggtccgacaggcccctggaaaaggactggaactggtgtctagcatcagcggcaacggcagaaccacctactacgccgatagcgtgaagggcagattcaccatcagccgggacatcagcaagaacaccctggacctccagatgaacagcctgagagccgaggataccgccgtgtactactgtgccaaggatggcggagagacactggtggatagcagaggccagggcacactggtcacagtgtcatctctcgaggacctgaagaacgtgttcccacctgaggtggccgtgttcgagcctagcgaggccgagatcagccacacccagaaagccaccctcgtgtgcctggctaccggcttctaccccgaccatgtggaactgtcttggtgggtcaacggcaaagaggtgcacagcggcgtgtctaccgacccccagccactgaaagaacagcccgccctgaacgacagccggtactgcctgagcagcagactgagagtgtccgccaccttctggcagaacccccggaaccacttcagatgccaggtgcagttctacggcctgagcgagaacgacgagtggacccaggacagagccaagcccgtgacccagatcgtgtctgccgaagcctggggcagagccgattgcggatcccagagcttcggcctgctggaccccaagctgtgctacctgctggatggcatcctgttcatctacggcgtgatcctgaccgccctgttcctgagagtgaagttcagcagaagcgccgacgcccctgcctaccagcagggacagaaccaactgtacaacgagctgaacctgggcagacgggaagagtacgacgtgctggacaagcggagaggcagggaccctgagatgggcggaaagccccagcggagaaagaacccccaggaaggactgtataacgaactccagaaagacaagatggccgaagcctacagcgagatcggcatgaagggcgagcggagaagaggcaagggccacgatggcctgtaccagggcctgagcaccgccaccaaggacacctatgacgccctgcacatgcaggccctgcctccaagaagggccaagcgatctggatctggagcaacaaacttctcactactcaaacaagcaggtgacgtggaggagaatcccgggcctactagtatggactggatttggcgcatccttttccttgtcggcgctgctaccggcgcgcattccttcgaagttcagttggtagagtctggaggcggagtggtacaaccggggcggtctcttagacttagttgcgcagcaagcggtttctctttctctggctatgggatgcactgggtgagacaggcccctgggaaaggactggagtgggtggcctacatttcatacgacgggagtaataaatactatgcagactccgttaagggcaggttcacgatctctcgggacaattccaagaatacattgtatcttcagatgaatagtctccgagctgaagacacggcggtttactactgcgctaaagacccggcctggggacttcgacttggagagagttctagctacgattttgacatttggggacaagggacaatggtcactgtctcaagtacgcgtatccagaaccctgatcctgccgtgtaccagctgcgggatagcaagagcagcgacaagagcgtgtgtctgttcaccgacttcgacagccagaccaacgtgtcccagagcaaggactccgacgtgtacatcaccgataagaccgtgctggacatgcggagcatggacttcaagagcaactccgccgtggcctggtccaacaagtccgatttcgcctgcgccaacgccttcaacaacagcattatccccgaggacacattcttcccaagccccgagagcagctgcggtacccagagttttgggttgttggaccctaaattgtgctatctgttggacggaatcctgttcatttacggagtgatcctgaccgcattgttcctgcgggttaagttttccagatccgcagacgcacccgcttaccaacaagggcagaaccaactctacaatgaacttaatttggggcggagggaagagtacgacgttctggacaaaaggaggggacgagatcccgagatgggcggaaagcctcagcgaaggaagaatccgcaagaggggctttataacgaactccagaaagataaaatggcagaagcctatagtgagattgggatgaagggagaaaggaggaggggtaaaggtcacgatgggttgtaccaaggattgagcacagccactaaagatacctatgatgcgctccacatgcaggccctgccgccaagacgcgccaagagaagcggatctggcgtgaagcagaccctgaatttcgacctgctgaagctggctggcgacgtggaatccaacccaggcccttctagaggccatatgaccgagtacaagcccacggtgcgcctcgccacccgcgacgacgtccccagggccgtacgcaccctcgccgccgcgttcgccgactaccccgccacgcgccacaccgtcgatccggaccgccacatcgagcgggtcaccgagctgcaagaactcttcctcacgcgcgtcgggctcgacatcggcaaggtgtgggtcgcggacgacggcgccgcggtggcggtctggaccacgccggagagcgtcgaagcgggggcggtgttcgccgagatcggcccgcgcatggccgagttgagcggttcccggctggccgcgcagcaacagatggaaggcctcctggcgccgcaccggcccaaggagcccgcgtggttcctggccaccgtcggcgtctcgcccgaccaccagggcaagggtctgggcagcgccgtcgtgctccccggagtggaggcggccgagcgcgccggggtgcccgccttcctggagacctccgcgccccgcaacctccccttctacgagcggctcggcttcaccgtcaccgccgacgtcgaggtgcccgaaggaccgcgcacctggtgcatgacccgcaagcccggtgcctga

SEQ ID NO: 9281 - DNA, 3240 bp, Artificial Sequence
  Synthetic Polynucleotide
atggccttaccagtgaccgccttgctcctgccgctggccttgctgctccacgccgccaggccgcaggtgcagctggttgaatctggcggaggactggttcagcctggcggatctctgagactgtcttgtgccgccagcggcttcaccttcaccaatcacgccatgagctgggtccgacaggcccctggaaaaggactggaactggtgtctagcatcagcggcaacggcagaaccacctactacgccgatagcgtgaagggcagattcaccatcagccgggacatcagcaagaacaccctggacctccagatgaacagcctgagagccgaggataccgccgtgtactactgtgccaaggatggcggagagacactggtggatagcagaggccagggcacactggtcacagtgtcatctctcgaggacctgaagaacgtgttcccacctgaggtggccgtgttcgagcctagcgaggccgagatcagccacacccagaaagccaccctcgtgtgcctggctaccggcttctaccccgaccatgtggaactgtcttggtgggtcaacggcaaagaggtgcacagcggcgtgtctaccgacccccagccactgaaagaacagcccgccctgaacgacagccggtactgcctgagcagcagactgagagtgtccgccaccttctggcagaacccccggaaccacttcagatgccaggtgcagttctacggcctgagcgagaacgacgagtggacccaggacagagccaagcccgtgacccagatcgtgtctgccgaagcctggggcagagccgattgcggatcccagagcttcggcctgctggaccccaagctgtgctacctgctggatggcatcctgttcatctacggcgtgatcctgaccgccctgttcctgagagtgaagttcagcagaagcgccgacgcccctgcctaccagcagggacagaaccaactgtacaacgagctgaacctgggcagacgggaagagtacgacgtgctggacaagcggagaggcagggaccctgagatgggcggaaagccccagcggagaaagaacccccaggaaggactgtataacgaactccagaaagacaagatggccgaagcctacagcgagatcggcatgaagggcgagcggagaagaggcaagggccacgatggcctgtaccagggcctgagcaccgccaccaaggacacctatgacgccctgcacatgcaggccctgcctccaagaagggccaagcgatctggatctggagcaacaaacttctcactactcaaacaagcaggtgacgtggaggagaatcccgggcctactagtatggactggatttggcgcatccttttccttgtcggcgctgctaccggcgcgcattccttcgaagttcagttggtagagtctggaggcggagtggtacaaccggggcggtctcttagacttagttgcgcagcaagcggtttctctttctctggctatgggatgcactgggtgagacaggcccctgggaaaggactggagtgggtggcctacatttcatacgacgggagtaataaatactatgcagactccgttaagggcaggttcacgatctctcgggacaattccaagaatacattgtatcttcagatgaatagtctccgagctgaagacacggcggtttactactgcgctaaagacccggcctggggacttcgacttggagagagttctagctacgattttgacatttggggacaagggacaatggtcactgtctcaagtacgcgtatccagaaccctgatcctgccgtgtaccagctgcgggatagcaagagcagcgacaagagcgtgtgtctgttcaccgacttcgacagccagaccaacgtgtcccagagcaaggactccgacgtgtacatcaccgataagaccgtgctggacatgcggagcatggacttcaagagcaactccgccgtggcctggtccaacaagtccgatttcgcctgcgccaacgccttcaacaacagcattatccccgaggacacattcttcccaagccccgagagcagctgcggtaccaagtctgtgcgcttttacctggtcgtcagccctgccagtgcctccactcagacatcttggaccccaagggaccttgtgtcctctcagacacagacacagtcctgcgtgccaccaactgctggcgcaagacaggctccagagtctcccagcacaatccccgtcccttctcagccccagaactccacacttaggccaggaccagctgctccaatcgcactggtcccagtgttctgcggactgctggttgccaagtctctggtgctgagcgcactcctcgtttggtggggcgatatttggtggaaaacgatgatggaattgagatccctcgatacgcagaaagccacatgccaccttcagcaagtcacagacttgccttggaccagcgtcagctctcccgtggaacgggaaattctgtatcatacagtggcccgcaccaagatttccgacgatgacgacgagcacacactgcgcgccaagagaagcggatctggcgtgaagcagaccctgaatttcgacctgctgaagctggctggcgacgtggaatccaacccaggcccttctagaggccatatgaccgagtacaagcccacggtgcgcctcgccacccgcgacgacgtccccagggccgtacgcaccctcgccgccgcgttcgccgactaccccgccacgcgccacaccgtcgatccggaccgccacatcgagcgggtcaccgagctgcaagaactcttcctcacgcgcgtcgggctcgacatcggcaaggtgtgggtcgcggacgacggcgccgcggtggcggtctggaccacgccggagagcgtcgaagcgggggcggtgttcgccgagatcggcccgcgcatggccgagttgagcggttcccggctggccgcgcagcaacagatggaaggcctcctggcgccgcaccggcccaaggagcccgcgtggttcctggccaccgtcggcgtctcgcccgaccaccagggcaagggtctgggcagcgccgtcgtgctccccggagtggaggcggccgagcgcgccggggtgcccgccttcctggagacctccgcgccccgcaacctccccttctacgagcggctcggcttcaccgtcaccgccgacgtcgaggtgcccgaaggaccgcgcacctggtgcatgacccgcaagcccggtgcctga

SEQ ID NO: 9282 - DNA, 3195 bp, Artificial Sequence
  Synthetic Polynucleotide
atggccttaccagtgaccgccttgctcctgccgctggccttgctgctccacgccgccaggccgcaggtgcagctggttgaatctggcggaggactggttcagcctggcggatctctgagactgtcttgtgccgccagcggcttcaccttcaccaatcacgccatgagctgggtccgacaggcccctggaaaaggactggaactggtgtctagcatcagcggcaacggcagaaccacctactacgccgatagcgtgaagggcagattcaccatcagccgggacatcagcaagaacaccctggacctccagatgaacagcctgagagccgaggataccgccgtgtactactgtgccaaggatggcggagagacactggtggatagcagaggccagggcacactggtcacagtgtcatctctcgagggacagcctaaggccaatcctaccgtgacactgttccctccaagcagcgaagaactccaggccaacaaggccacacttgtgtgcctgatctccgacttctaccctggggctgtgacagtggcttggaaggccgatggatctcctgtgaaagccggcgtggaaaccaccaagccatccaagcagagcaacaacaaatacgccgccagctcctacctgagcctgacacctgagcagtggaagtcccacagatcctacagctgccaagtgacccacgaaggcagcaccgtggaaaagacagtggcccctacagagtgcagcggatcccagagcttcggcctgctggaccccaagctgtgctacctgctggatggcatcctgttcatctacggcgtgatcctgaccgccctgttcctgagagtgaagttcagcagaagcgccgacgcccctgcctaccagcagggacagaaccaactgtacaacgagctgaacctgggcagacgggaagagtacgacgtgctggacaagcggagaggcagggaccctgagatgggcggaaagccccagcggagaaagaacccccaggaaggactgtataacgaactccagaaagacaagatggccgaagcctacagcgagatcggcatgaagggcgagcggagaagaggcaagggccacgatggcctgtaccagggcctgagcaccgccaccaaggacacctatgacgccctgcacatgcaggccctgcctccaagaagggccaagcgatctggatctggagcaacaaacttctcactactcaaacaagcaggtgacgtggaggagaatcccgggcctactagtatggactggatttggcgcatccttttccttgtcggcgctgctaccggcgcgcattccttcgaagttcagttggtagagtctggaggcggagtggtacaaccggggcggtctcttagacttagttgcgcagcaagcggtttctctttctctggctatgggatgcactgggtgagacaggcccctgggaaaggactggagtgggtggcctacatttcatacgacgggagtaataaatactatgcagactccgttaagggcaggttcacgatctctcgggacaattccaagaatacattgtatcttcagatgaatagtctccgagctgaagacacggcggtttactactgcgctaaagacccggcctggggacttcgacttggagagagttctagctacgattttgacatttggggacaagggacaatggtcactgtctcaagtacgcgtgcctctacaaagggaccctccgtgtttcctctggctcccagcagcaagtctacaagcggaggaacagccgctctgggctgcctggtcaaggattactttcccgagcctgtgaccgtgtcctggaatagcggagcactgacaagcggcgtgcacacctttccagccgtgctgcaaagcagcggcctgtactctctgagcagcgtggtcacagtgcctagctctagcctgggcacccagacctacatctgcaatgtgaaccacaagcctagcaacaccaaggtggacaagagagtggaacccaagagctgtggtaccaagtctgtgcgcttttacctggtcgtcagccctgccagtgcctccactcagacatcttggaccccaagggaccttgtgtcctctcagacacagacacagtcctgcgtgccaccaactgctggcgcaagacaggctccagagtctcccagcacaatccccgtcccttctcagccccagaactccacacttaggccaggaccagctgctccaatcgcactggtcccagtgttctgcggactgctggttgccaagtctctggtgctgagcgcactcctcgtttggtggggcgatatttggtggaaaacgatgatggaattgagatccctcgatacgcagaaagccacatgccaccttcagcaagtcacagacttgccttggaccagcgtcagctctcccgtggaacgggaaattctgtatcatacagtggcccgcaccaagatttccgacgatgacgacgagcacacactgcgcgccaagagaagcggatctggcgtgaagcagaccctgaatttcgacctgctgaagctggctggcgacgtggaatccaacccaggcccttctagaggccatatgaccgagtacaagcccacggtgcgcctcgccacccgcgacgacgtccccagggccgtacgcaccctcgccgccgcgttcgccgactaccccgccacgcgccacaccgtcgatccggaccgccacatcgagcgggtcaccgagctgcaagaactcttcctcacgcgcgtcgggctcgacatcggcaaggtgtgggtcgcggacgacggcgccgcggtggcggtctggaccacgccggagagcgtcgaagcgggggcggtgttcgccgagatcggcccgcgcatggccgagttgagcggttcccggctggccgcgcagcaacagatggaaggcctcctggcgccgcaccggcccaaggagcccgcgtggttcctggccaccgtcggcgtctcgcccgaccaccagggcaagggtctgggcagcgccgtcgtgctccccggagtggaggcggccgagcgcgccggggtgcccgccttcctggagacctccgcgccccgcaacctccccttctacgagcggctcggcttcaccgtcaccgccgacgtcgaggtgcccgaaggaccgcgcacctggtgcatgacccgcaagcccggtgcctga

SEQ ID NO: 9283 - DNA, 3156 bp, Artificial Sequence
  Synthetic Polynucleotide
atggccttaccagtgaccgccttgctcctgccgctggccttgctgctccacgccgccaggccgcaggtgcagctggttgaatctggcggaggactggttcagcctggcggatctctgagactgtcttgtgccgccagcggcttcaccttcaccaatcacgccatgagctgggtccgacaggcccctggaaaaggactggaactggtgtctagcatcagcggcaacggcagaaccacctactacgccgatagcgtgaagggcagattcaccatcagccgggacatcagcaagaacaccctggacctccagatgaacagcctgagagccgaggataccgccgtgtactactgtgccaaggatggcggagagacactggtggatagcagaggccagggcacactggtcacagtgtcatctctcgagggacagcctaaggccaatcctaccgtgacactgttccctccaagcagcgaagaactccaggccaacaaggccacacttgtgtgcctgatctccgacttctaccctggggctgtgacagtggcttggaaggccgatggatctcctgtgaaagccggcgtggaaaccaccaagccatccaagcagagcaacaacaaatacgccgccagctcctacctgagcctgacacctgagcagtggaagtcccacagatcctacagctgccaagtgacccacgaaggcagcaccgtggaaaagacagtggcccctacagagtgcagcggatcccagagcttcggcctgctggaccccaagctgtgctacctgctggatggcatcctgttcatctacggcgtgatcctgaccgccctgttcctgagagtgaagttcagcagaagcgccgacgcccctgcctaccagcagggacagaaccaactgtacaacgagctgaacctgggcagacgggaagagtacgacgtgctggacaagcggagaggcagggaccctgagatgggcggaaagccccagcggagaaagaacccccaggaaggactgtataacgaactccagaaagacaagatggccgaagcctacagcgagatcggcatgaagggcgagcggagaagaggcaagggccacgatggcctgtaccagggcctgagcaccgccaccaaggacacctatgacgccctgcacatgcaggccctgcctccaagaagggccaagcgatctggatctggagcaacaaacttctcactactcaaacaagcaggtgacgtggaggagaatcccgggcctactagtatggactggatttggcgcatccttttccttgtcggcgctgctaccggcgcgcattccttcgaagttcagttggtagagtctggaggcggagtggtacaaccggggcggtctcttagacttagttgcgcagcaagcggtttctctttctctggctatgggatgcactgggtgagacaggcccctgggaaaggactggagtgggtggcctacatttcatacgacgggagtaataaatactatgcagactccgttaagggcaggttcacgatctctcgggacaattccaagaatacattgtatcttcagatgaatagtctccgagctgaagacacggcggtttactactgcgctaaagacccggcctggggacttcgacttggagagagttctagctacgattttgacatttggggacaagggacaatggtcactgtctcaagtacgcgtgcctctacaaagggaccctccgtgtttcctctggctcccagcagcaagtctacaagcggaggaacagccgctctgggctgcctggtcaaggattactttcccgagcctgtgaccgtgtcctggaatagcggagcactgacaagcggcgtgcacacctttccagccgtgctgcaaagcagcggcctgtactctctgagcagcgtggtcacagtgcctagctctagcctgggcacccagacctacatctgcaatgtgaaccacaagcctagcaacaccaaggtggacaagagagtggaacccaagagctgtggtacccagagttttgggttgttggaccctaaattgtgctatctgttggacggaatcctgttcatttacggagtgatcctgaccgcattgttcctgcgggttaagttttccagatccgcagacgcacccgcttaccaacaagggcagaaccaactctacaatgaacttaatttggggcggagggaagagtacgacgttctggacaaaaggaggggacgagatcccgagatgggcggaaagcctcagcgaaggaagaatccgcaagaggggctttataacgaactccagaaagataaaatggcagaagcctatagtgagattgggatgaagggagaaaggaggaggggtaaaggtcacgatgggttgtaccaaggattgagcacagccactaaagatacctatgatgcgctccacatgcaggccctgccgccaagacgcgccaagagaagcggatctggcgtgaagcagaccctgaatttcgacctgctgaagctggctggcgacgtggaatccaacccaggcccttctagaggccatatgaccgagtacaagcccacggtgcgcctcgccacccgcgacgacgtccccagggccgtacgcaccctcgccgccgcgttcgccgactaccccgccacgcgccacaccgtcgatccggaccgccacatcgagcgggtcaccgagctgcaagaactcttcctcacgcgcgtcgggctcgacatcggcaaggtgtgggtcgcggacgacggcgccgcggtggcggtctggaccacgccggagagcgtcgaagcgggggcggtgttcgccgagatcggcccgcgcatggccgagttgagcggttcccggctggccgcgcagcaacagatggaaggcctcctggcgccgcaccggcccaaggagcccgcgtggttcctggccaccgtcggcgtctcgcccgaccaccagggcaagggtctgggcagcgccgtcgtgctccccggagtggaggcggccgagcgcgccggggtgcccgccttcctggagacctccgcgccccgcaacctccccttctacgagcggctcggcttcaccgtcaccgccgacgtcgaggtgcccgaaggaccgcgcacctggtgcatgacccgcaagcccggtgcctga

SEQ ID NO: 9284 - DNA, 2391 bp, Artificial Sequence
  Synthetic Polynucleotide
atggccttaccagtgaccgccttgctcctgccgctggccttgctgctccacgccgccaggccggacatccagatgacacagagccctagcagcctgtctgccagcgtgggagacagagtgaccatcacatgcaaggccagcgaccacatcaacaactggctggcctggtatcagcagaagcctggacaggcccctaagctgctgatctacggcgctaccacactggaaacaggcgtgcccagcagattttctggcagcggctctggcaccgactacaccctgacaatatccagcctccagcctgaggacttcgccacctactactgtcagcagagctggaacaccccttggacattcggccagggcaccaagctggaaatcaagagaggcggaggcggaagtggaggcggaggatctggcggcggaggctctcaagttcagcttcaacagcctggcgctgagctggtcaaacctggcgcttctgtgaagatgagctgcaaagccagcggctacgccttcagcagctactggatcaactggatgaagcagaaacccggccagggactcgaatggatcggccaaatctatcccggcgacggcgacaccaactacaacggcaagttcaagggcagagccacactgaccgccgatacctctagcagcacagcctacatgcagctgagcagcctgaccagcgaagatagcgccgtgtacttctgtgcccggtccatcacaacagtcgtgggctgcgctatggactattggggccagggaacaagcgtgaccgtgtctagtacgcgtgagcccaaatcttgtgacaaaactcacacatgcccaccgtgcccagcacctgaactcctggggggaccgtcagtcttcctcttccccccaaaacccaaggacaccctcatgatctcccggacccctgaggtcacatgcgtggtggtggacgtgagccacgaagaccctgaggtcaagttcaactggtacgtggacggcgtggaggtgcataatgccaagacaaagccgcgggaggagcagtacaacagcacgtaccgtgtggtcagcgtcctcaccgtcctgcaccaggactggctgaatggcaaggagtacaagtgcaaggtctccaacaaagccctcccagcccccatcgagaaaaccatctccaaagccaaagggcagccccgagaaccacaggtgtacaccctgcccccatcccgggaggagatgaccaagaaccaggtcagcctgacctgcctggtcaaaggcttctatcccagcgacatcgccgtggagtgggagagcaatgggcagccggagaacaactacaagaccacgcctcccgtgctggactccgacggctccttcttcctctatagcaagctcaccgtggacaagagcaggtggcagcaggggaacgtcttctcatgctccgtgatgcatgaggctctgcacaaccactacacgcagaagagcctctccctgtctccgggtaaaggtaccatcactcaaggtttggcagtgtcaaccatctcatcattctttccacctggctaccaagtgtccttctgcctggtcatggtgctgctgttcgccgtggataccggcctgtacttcagcgtcaagaccaacatccggtccagcaccagagactggaaggaccacaagttcaagtggcggaaggaccctcaggacaagagggccaagcgatctggatctggagcaacaaacttctcactactcaaacaagcaggtgacgtggaggagaatcccgggccttctagaggccatatgaccgagtacaagcccacggtgcgcctcgccacccgcgacgacgtccccagggccgtacgcaccctcgccgccgcgttcgccgactaccccgccacgcgccacaccgtcgatccggaccgccacatcgagcgggtcaccgagctgcaagaactcttcctcacgcgcgtcgggctcgacatcggcaaggtgtgggtcgcggacgacggcgccgcggtggcggtctggaccacgccggagagcgtcgaagcgggggcggtgttcgccgagatcggcccgcgcatggccgagttgagcggttcccggctggccgcgcagcaacagatggaaggcctcctggcgccgcaccggcccaaggagcccgcgtggttcctggccaccgtcggcgtctcgcccgaccaccagggcaagggtctgggcagcgccgtcgtgctccccggagtggaggcggccgagcgcgccggggtgcccgccttcctggagacctccgcgccccgcaacctccccttctacgagcggctcggcttcaccgtcaccgccgacgtcgaggtgcccgaaggaccgcgcacctggtgcatgacccgcaagcccggtgcctga

SEQ ID NO: 9285 - DNA, 2769 bp, Artificial Sequence
  Synthetic Polynucleotide
atggccttaccagtgaccgccttgctcctgccgctggccttgctgctccacgccgccaggccggacatccagatgacacagagccctagcagcctgtctgccagcgtgggagacagagtgaccatcacatgcaaggccagcgaccacatcaacaactggctggcctggtatcagcagaagcctggacaggcccctaagctgctgatctacggcgctaccacactggaaacaggcgtgcccagcagattttctggcagcggctctggcaccgactacaccctgacaatatccagcctccagcctgaggacttcgccacctactactgtcagcagagctggaacaccccttggacattcggccagggcaccaagctggaaatcaagagaggcggaggcggaagtggaggcggaggatctggcggcggaggctctcaagttcagcttcaacagcctggcgctgagctggtcaaacctggcgcttctgtgaagatgagctgcaaagccagcggctacgccttcagcagctactggatcaactggatgaagcagaaacccggccagggactcgaatggatcggccaaatctatcccggcgacggcgacaccaactacaacggcaagttcaagggcagagccacactgaccgccgatacctctagcagcacagcctacatgcagctgagcagcctgaccagcgaagatagcgccgtgtacttctgtgcccggtccatcacaacagtcgtgggctgcgctatggactattggggccagggaacaagcgtgaccgtgtctagtacgcgtgagcccaaatcttgtgacaaaactcacacatgcccaccgtgcccagcacctgaactcctggggggaccgtcagtcttcctcttccccccaaaacccaaggacaccctcatgatctcccggacccctgaggtcacatgcgtggtggtggacgtgagccacgaagaccctgaggtcaagttcaactggtacgtggacggcgtggaggtgcataatgccaagacaaagccgcgggaggagcagtacaacagcacgtaccgtgtggtcagcgtcctcaccgtcctgcaccaggactggctgaatggcaaggagtacaagtgcaaggtctccaacaaagccctcccagcccccatcgagaaaaccatctccaaagccaaagggcagccccgagaaccacaggtgtacaccctgcccccatcccgggaggagatgaccaagaaccaggtcagcctgacctgcctggtcaaaggcttctatcccagcgacatcgccgtggagtgggagagcaatgggcagccggagaacaactacaagaccacgcctcccgtgctggactccgacggctccttcttcctctatagcaagctcaccgtggacaagagcaggtggcagcaggggaacgtcttctcatgctccgtgatgcatgaggctctgcacaaccactacacgcagaagagcctctccctgtctccgggtaaaggtaccacaacgccgggcgaaaggagttccttgccggccttttaccccggcacaagcggaagctgtagtgggtgtggaagcctcagcctcccacttcttgcgggcctcgtcgcggcagatgcagtagcttcacttcttattgtaggcgcggtatttctctgtgctcgaccaaggaggtcacccgctcaggaggatggtaaggtgtatataaatatgccaggacgcggaagctctagacgggttaagttttccagatccgcagacgcacccgcttaccaacaagggcagaaccaactctacaatgaacttaatttggggcggagggaagagtacgacgttctggacaaaaggaggggacgagatcccgagatgggcggaaagcctcagcgaaggaagaatccgcaagaggggctttataacgaactccagaaagataaaatggcagaagcctatagtgagattgggatgaagggagaaaggaggaggggtaaaggtcacgatgggttgtaccaaggattgagcacagccactaaagatacctatgatgcgctccacatgcaggccctgccgccaagacgcgccaagagaagcggatctggcgtgaagcagaccctgaatttcgacctgctgaagctggctggcgacgtggaatccaacccaggccctggccatatgaccgagtacaagcccacggtgcgcctcgccacccgcgacgacgtccccagggccgtacgcaccctcgccgccgcgttcgccgactaccccgccacgcgccacaccgtcgatccggaccgccacatcgagcgggtcaccgagctgcaagaactcttcctcacgcgcgtcgggctcgacatcggcaaggtgtgggtcgcggacgacggcgccgcggtggcggtctggaccacgccggagagcgtcgaagcgggggcggtgttcgccgagatcggcccgcgcatggccgagttgagcggttcccggctggccgcgcagcaacagatggaaggcctcctggcgccgcaccggcccaaggagcccgcgtggttcctggccaccgtcggcgtctcgcccgaccaccagggcaagggtctgggcagcgccgtcgtgctccccggagtggaggcggccgagcgcgccggggtgcccgccttcctggagacctccgcgccccgcaacctccccttctacgagcggctcggcttcaccgtcaccgccgacgtcgaggtgcccgaaggaccgcgcacctggtgcatgacccgcaagcccggtgcctga

SEQ ID NO: 9286 - DNA, 3401 bp, Artificial Sequence; identical to SEQ ID NO: 8509
  Synthetic Polynucleotide

SEQ ID NO: 9287 - DNA, 3329 bp, Artificial Sequence; identical to SEQ ID NO: 8512
  Synthetic Polynucleotide

SEQ ID NO: 9288 - DNA, 2595 bp, Artificial Sequence; identical to SEQ ID NO: 9251
  Synthetic Polynucleotide

SEQ ID NO: 9289 - DNA, 1830 bp, Artificial Sequence; identical to SEQ ID NO: 7693
  Synthetic Polynucleotide

SEQ ID NO: 9290 - DNA, 2208 bp, Artificial Sequence; identical to SEQ ID NO: 7694
  Synthetic Polynucleotide

SEQ ID NO: 9291 - DNA, 1839 bp, Artificial Sequence
  Synthetic Polynucleotide
atggccttaccagtgaccgccttgctcctgccgctggccttgctgctccacgccgccaggccggacatccagatgacacagagccctagcagcctgtctgccagcgtgggagacagagtgaccatcacatgcaaggccagcgaccacatcaacaactggctggcctggtatcagcagaagcctggacaggcccctaagctgctgatctacggcgctaccacactggaaacaggcgtgcccagcagattttctggcagcggctctggcaccgactacaccctgacaatatccagcctccagcctgaggacttcgccacctactactgtcagcagagctggaacaccccttggacattcggccagggcaccaagctggaaatcaagagaggcggaggcggaagtggaggcggaggatctggcggcggaggctctcaagttcagcttcaacagcctggcgctgagctggtcaaacctggcgcttctgtgaagatgagctgcaaagccagcggctacgccttcagcagctactggatcaactggatgaagcagaaacccggccagggactcgaatggatcggccaaatctatcccggcgacggcgacaccaactacaacggcaagttcaagggcagagccacactgaccgccgatacctctagcagcacagcctacatgcagctgagcagcctgaccagcgaagatagcgccgtgtacttctgtgcccggtccatcacaacagtcgtgggctgcgctatggactattggggccagggaacaagcgtgaccgtgtctagtacgcgtaccacgacgccagcgccgcgaccaccaacaccggcgcccaccatcgcgtcgcagcccctgtccctgcgcccagaggcgtgccggccagcggcggggggcgcagtgcacacgagggggctggacttcgcctgtgacggatccattacccaaggactggctgtgcctacaatctctagcttctttccgcctggataccaagtctccttctgtcttgtgatggtcctcctgtttgctgtggacacaggactgtacttttccgtgaaaacgaacatccgcagctccacacgcgattggaaagatcacaagtttaaatggcgcaaagatccccaggacaagcgcgccaagagaagcggatctggcgtgaagcagaccctgaatttcgacctgctgaagctggctggcgacgtggaatccaacccaggccctactagaggccatatgaccgagtacaagcccacggtgcgcctcgccacccgcgacgacgtccccagggccgtacgcaccctcgccgccgcgttcgccgactaccccgccacgcgccacaccgtcgatccggaccgccacatcgagcgggtcaccgagctgcaagaactcttcctcacgcgcgtcgggctcgacatcggcaaggtgtgggtcgcggacgacggcgccgcggtggcggtctggaccacgccggagagcgtcgaagcgggggcggtgttcgccgagatcggcccgcgcatggccgagttgagcggttcccggctggccgcgcagcaacagatggaaggcctcctggcgccgcaccggcccaaggagcccgcgtggttcctggccaccgtcggcgtctcgcccgaccaccagggcaagggtctgggcagcgccgtcgtgctccccggagtggaggcggccgagcgcgccggggtgcccgccttcctggagacctccgcgccccgcaacctccccttctacgagcggctcggcttcaccgtcaccgccgacgtcgaggtgcccgaaggaccgcgcacctggtgcatgacccgcaagcccggtgcctga

SEQ ID NO: 9292 - DNA, 1863 bp, Artificial Sequence
  Synthetic Polynucleotide
atggccttaccagtgaccgccttgctcctgccgctggccttgctgctccacgccgccaggccggacatccagatgacacagagccctagcagcctgtctgccagcgtgggagacagagtgaccatcacatgcaaggccagcgaccacatcaacaactggctggcctggtatcagcagaagcctggacaggcccctaagctgctgatctacggcgctaccacactggaaacaggcgtgcccagcagattttctggcagcggctctggcaccgactacaccctgacaatatccagcctccagcctgaggacttcgccacctactactgtcagcagagctggaacaccccttggacattcggccagggcaccaagctggaaatcaagagaggcggaggcggaagtggaggcggaggatctggcggcggaggctctcaagttcagcttcaacagcctggcgctgagctggtcaaacctggcgcttctgtgaagatgagctgcaaagccagcggctacgccttcagcagctactggatcaactggatgaagcagaaacccggccagggactcgaatggatcggccaaatctatcccggcgacggcgacaccaactacaacggcaagttcaagggcagagccacactgaccgccgatacctctagcagcacagcctacatgcagctgagcagcctgaccagcgaagatagcgccgtgtacttctgtgcccggtccatcacaacagtcgtgggctgcgctatggactattggggccagggaacaagcgtgaccgtgtctagtacgcgtaccacgacgccagcgccgcgaccaccaacaccggcgcccaccatcgcgtcgcagcccctgtccctgcgcccagaggcgtgccggccagcggcggggggcgcagtgcacacgagggggctggacttcgcctgtgacggatccgtggtggaaaaagagcaccctcagctcggagccggaacagtgctgcttctgagagccggcttttacgccgtgtcctttctgtctgtggccgtgggcagcaccgtgtactatcagggcaagtgcctgacctggaagggacctagaaggcaactgcctgctgtggtgcctgctcctttgcctcctccatgtggaagctctgcccatctgctgccacctgttccaggcggaagggccaagcgatctggatctggagcaacaaacttctcactactcaaacaagcaggtgacgtggaggagaatcccgggcctactagaggccatatgaccgagtacaagcccacggtgcgcctcgccacccgcgacgacgtccccagggccgtacgcaccctcgccgccgcgttcgccgactaccccgccacgcgccacaccgtcgatccggaccgccacatcgagcgggtcaccgagctgcaagaactcttcctcacgcgcgtcgggctcgacatcggcaaggtgtgggtcgcggacgacggcgccgcggtggcggtctggaccacgccggagagcgtcgaagcgggggcggtgttcgccgagatcggcccgcgcatggccgagttgagcggttcccggctggccgcgcagcaacagatggaaggcctcctggcgccgcaccggcccaaggagcccgcgtggttcctggccaccgtcggcgtctcgcccgaccaccagggcaagggtctgggcagcgccgtcgtgctccccggagtggaggcggccgagcgcgccggggtgcccgccttcctggagacctccgcgccccgcaacctccccttctacgagcggctcggcttcaccgtcaccgccgacgtcgaggtgcccgaaggaccgcgcacctggtgcatgacccgcaagcccggtgcctga

SEQ ID NO: 9293 - DNA, 2217 bp, Artificial Sequence; identical to SEQ ID NO: 7676
  Synthetic Polynucleotide

SEQ ID NO: 9294 - DNA, 1863 bp, Artificial Sequence; identical to SEQ ID NO: 9292
  Synthetic Polynucleotide

SEQ ID NO: 9295 - DNA, 3150 bp, Artificial Sequence; identical to SEQ ID NO: 9264
  Synthetic Polynucleotide

SEQ ID NO: 9296 - DNA, 2910 bp, Artificial Sequence; identical to SEQ ID NO: 9265
  Synthetic Polynucleotide

SEQ ID NO: 9297 - DNA, 2997 bp, Artificial Sequence; identical to SEQ ID NO: 9266
  Synthetic Polynucleotide

SEQ ID NO: 9298 - DNA, 3195 bp, Artificial Sequence; identical to SEQ ID NO: 9267
  Synthetic Polynucleotide

SEQ ID NO: 9299 - DNA, 2952 bp, Artificial Sequence; identical to SEQ ID NO: 9263
  Synthetic Polynucleotide

SEQ ID NO: 9300 - DNA, 2955 bp, Artificial Sequence; identical to SEQ ID NO: 9268
  Synthetic Polynucleotide

SEQ ID NO: 9301 - DNA, 1080 bp, Artificial Sequence; identical to SEQ ID NO: 9271
  Synthetic Polynucleotide

SEQ ID NO: 9302 - DNA, 3048 bp, Artificial Sequence
  Synthetic Polynucleotide
atggccttaccagtgaccgccttgctcctgccgctggccttgctgctccacgccgccaggccggacatccagatgacacagagccctagcagcctgtctgccagcgtgggagacagagtgaccatcacatgcaaggccagcgaccacatcaacaactggctggcctggtatcagcagaagcctggacaggcccctaagctgctgatctacggcgctaccacactggaaacaggcgtgcccagcagattttctggcagcggctctggcaccgactacaccctgacaatatccagcctccagcctgaggacttcgccacctactactgtcagcagagctggaacaccccttggacattcggccagggcaccaagctggaaatcaagagactcgaggacctgaagaacgtgttcccacctgaggtggccgtgttcgagcctagcgaggccgagatcagccacacccagaaagccaccctcgtgtgcctggctaccggcttctaccccgaccatgtggaactgtcttggtgggtcaacggcaaagaggtgcacagcggcgtgtctaccgacccccagccactgaaagaacagcccgccctgaacgacagccggtactgcctgagcagcagactgagagtgtccgccaccttctggcagaacccccggaaccacttcagatgccaggtgcagttctacggcctgagcgagaacgacgagtggacccaggacagagccaagcccgtgacccagatcgtgtctgccgaagcctggggcagagccgattgcggatcccagagcttcggcctgctggaccccaagctgtgctacctgctggatggcatcctgttcatctacggcgtgatcctgaccgccctgttcctgagagtgaagttcagcagaagcgccgacgcccctgcctaccagcagggacagaaccaactgtacaacgagctgaacctgggcagacgggaagagtacgacgtgctggacaagcggagaggcagggaccctgagatgggcggaaagccccagcggagaaagaacccccaggaaggactgtataacgaactccagaaagacaagatggccgaagcctacagcgagatcggcatgaagggcgagcggagaagaggcaagggccacgatggcctgtaccagggcctgagcaccgccaccaaggacacctatgacgccctgcacatgcaggccctgcctccaagaagggccaagcgatctggatctggagcaacaaacttctcactactcaaacaagcaggtgacgtggaggagaatcccgggcctactagtatggactggatttggcgcatccttttccttgtcggcgctgctaccggcgcgcattccttcgaacaagttcagcttcaacagcctggcgctgagctggtcaaacctggcgcttctgtgaagatgagctgcaaagccagcggctacgccttcagcagctactggatcaactggatgaagcagaaacccggccagggactcgaatggatcggccaaatctatcccggcgacggcgacaccaactacaacggcaagttcaagggcagagccacactgaccgccgatacctctagcagcacagcctacatgcagctgagcagcctgaccagcgaagatagcgccgtgtacttctgtgcccggtccatcacaacagtcgtgggctgcgctatggactattggggccagggaacaagcgtgaccgtgtctagtacgcgtgcctctacaaagggaccctccgtgtttcctctggctcccagcagcaagtctacaagcggaggaacagccgctctgggctgcctggtcaaggattactttcccgagcctgtgaccgtgtcctggaatagcggagcactgacaagcggcgtgcacacctttccagccgtgctgcaaagcagcggcctgtactctctgagcagcgtggtcacagtgcctagctctagcctgggcacccagacctacatctgcaatgtgaaccacaagcctagcaacaccaaggtggacaagagagtggaacccaagagctgtacaacgccgggcgaaaggagttccttgccggccttttaccccggcacaagcggaagctgtagtgggtgtggaagcctcagcctcccacttcttgcgggcctcgtcgcggcagatgcagtagcttcacttcttattgtaggcgcggtatttctctgtgctcgaccaaggaggtcacccgctcaggaggatggtaaggtgtatataaatatgccaggacgcggacgcgccaagagaagcggatctggcgtgaagcagaccctgaatttcgacctgctgaagctggctggcgacgtggaatccaacccaggcccttctagaatgtaccggatgcagctgctgagctgtatcgccctgtctctggccctggtcacaaatagcgcccctaccagcagcagcaccaagaaaacccagctgcaactggaacacctcctgctggacctccagatgatcctgaacggcatcaacaactacaagaaccccaagctgacccggatgctgaccttcaagttctacatgcccaagaaggccaccgagctgaagcacctccagtgcctggaagaggaactgaagcccctggaagaagtgctgaatctggcccagagcaagaacttccacctgaggccaagggacctgatctccaacatcaacgtgatcgtgctggaactgaaaggcagcgagacaaccttcatgtgcgagtacgccgacgagacagctaccatcgtggaatttctgaatcggtggatcaccttctgccagagcatcatcagcaccctgacagcgcgtaaaattgaagttatgtatcctcctccttacctagacaatgagaagagcaatggaaccattatccatgtgaaagggaaacacctttgtccaagtcccctatttcccggaccttctaagcccttttgggtgctggtggtggttgggggagtcctggcttgctatagcttgctagtaacagtggcctttattattttctgggtgaggagtaagaggagctaa

SEQ ID NO: 9303 - DNA, 1941 bp, Artificial Sequence
  Synthetic Polynucleotide
atggccttaccagtgaccgccttgctcctgccgctggccttgctgctccacgccgccaggccggacatccagatgacacagagccctagcagcctgtctgccagcgtgggagacagagtgaccatcacatgcaaggccagcgaccacatcaacaactggctggcctggtatcagcagaagcctggacaggcccctaagctgctgatctacggcgctaccacactggaaacaggcgtgcccagcagattttctggcagcggctctggcaccgactacaccctgacaatatccagcctccagcctgaggacttcgccacctactactgtcagcagagctggaacaccccttggacattcggccagggcaccaagctggaaatcaagagaggcggaggcggaagtggaggcggaggatctggcggcggaggctctcaagttcagcttcaacagcctggcgctgagctggtcaaacctggcgcttctgtgaagatgagctgcaaagccagcggctacgccttcagcagctactggatcaactggatgaagcagaaacccggccagggactcgaatggatcggccaaatctatcccggcgacggcgacaccaactacaacggcaagttcaagggcagagccacactgaccgccgatacctctagcagcacagcctacatgcagctgagcagcctgaccagcgaagatagcgccgtgtacttctgtgcccggtccatcacaacagtcgtgggctgcgctatggactattggggccagggaacaagcgtgaccgtgtctagtacgcgtaccacgacgccagcgccgcgaccaccaacaccggcgcccaccatcgcgtcgcagcccctgtccctgcgcccagaggcgtgccggccagcggcggggggcgcagtgcacacgagggggctggacttcgcctgtgacggatccgtggtggaaaaagagcaccctcagctcggagccggaacagtgctgcttctgagagccggcttttacgccgtgtcctttctgtctgtggccgtgggcagcaccgtgtactatcagggcaagtgcctgacctggaagggacctagaaggcaactgcctgctgtggtgcctgctcctttgcctcctccatgtggaagctctgcccatctgctgccacctgttccaggcggaagggccaagcgatctggatctggagcaacaaacttctcactactcaaacaagcaggtgacgtggaggagaatcccgggcctactagaatgtaccggatgcagctgctgagctgtatcgccctgtctctggccctggtcacaaatagcgcccctaccagcagcagcaccaagaaaacccagctgcaactggaacacctcctgctggacctccagatgatcctgaacggcatcaacaactacaagaaccccaagctgacccggatgctgaccttcaagttctacatgcccaagaaggccaccgagctgaagcacctccagtgcctggaagaggaactgaagcccctggaagaagtgctgaatctggcccagagcaagaacttccacctgaggccaagggacctgatctccaacatcaacgtgatcgtgctggaactgaaaggcagcgagacaaccttcatgtgcgagtacgccgacgagacagctaccatcgtggaatttctgaatcggtggatcaccttctgccagagcatcatcagcaccctgacagcgcgtaaaattgaagttatgtatcctcctccttacctagacaatgagaagagcaatggaaccattatccatgtgaaagggaaacacctttgtccaagtcccctatttcccggaccttctaagcccttttgggtgctggtggtggttgggggagtcctggcttgctatagcttgctagtaacagtggcctttattattttctgggtgaggagtaagaggagctaa

SEQ ID NO: 9304 - DNA, 2868 bp, Artificial Sequence; identical to SEQ ID NO: 9269
  Synthetic Polynucleotide

SEQ ID NO: 9305 - DNA, 2913 bp, Artificial Sequence; identical to SEQ ID NO: 9270
  Synthetic Polynucleotide

SEQ ID NO: 9306 - DNA, 1164 bp, Artificial Sequence
  Synthetic Polynucleotide
atggccttaccagtgaccgccttgctcctgccgctggccttgctgctccacgccgccaggccggaagtgcagctggttgaatctggcggaggactggttcaggctggcggatctctgagactgtcttgtgccgccagcggcagaacctttagcatgggctggtttagacaggcccctggcaaagagagagagttcgtcgccgccatcacatactctggcggcagcccttactacgccgactctgtgaagggcagattcaccatcagccgggacaacgccaagaacaccgtgtacctccagatgaacagcctgaagcctgaggacaccgccgtgtactactgcgccgccaatccaacatacggcagcgactggaacgccgagaattggggccagggaacccaagtgacagtgtctagcggtaccggcggaggcggatctggcggcggaggtagcggtggcggaggatctgaattcgacatccagatgacacagagccctagcagcctgtctgccagcgtgggagacagagtgaccatcacatgcaaggccagcgaccacatcaacaactggctggcctggtatcagcagaagcctggacaggcccctaagctgctgatctacggcgctaccacactggaaacaggcgtgcccagcagattttctggcagcggctctggcaccgactacaccctgacaatatccagcctccagcctgaggacttcgccacctactactgtcagcagagctggaacaccccttggacattcggccagggcaccaagctggaaatcaagagactcgagaaaattgaagttatgtatcctcctccttacctagacaatgagaagagcaatggaaccattatccatgtgaaaggatccgtcgagaaagaacatccacagcttggcgctggcaccgtcctgttgcttagagccggattctatgccgtcagcttcctgtccgtggctgtgtggtggggcgatatttggtggaaaacgatgatggaattgagatccctcgatacgcagaaagccacatgccaccttcagcaagtcacagacttgccttggaccagcgtcagctctcccgtggaacgggaaattctgtatcatacagtggcccgcaccaagatttccgacgatgacgacgagcacacactgtaa

SEQ ID NO: 9307 - DNA, 1164 bp, Artificial Sequence; identical to SEQ ID NO: 9306
  Synthetic Polynucleotide

SEQ ID NO: 9308 - DNA, 1518 bp, Artificial Sequence
  Synthetic Polynucleotide
atgagcaagcagagaggcaccttcagcgaggtgtcactggctcaggaccctaagtggcagcagagaaagcccaagggcaacaagagcagcatcagcggcaccgagcaagagattttccaggtggaactgaacctccagaacgccagcctgaaccaccagggcatcgacaaaatctacgactgccagggcctgctgcctcctccagaaaaactgacagccgaggtgctgggcatcatctgcatcgtgctgatggctaccgtgctgaaaacgattgtgctgatcccattcctggaacagaacaacagcagccccaacgccagaacacagaaggccagacactgcggacactgccccgaggaatggatcacctacagcaacagctgctactacatcggcaaagagcggcggacctgggaagagtctcttcaggcttgcgccagcaagaacagcagctccctgctgtgtatcgacaacgaggaagagatgaagttcctggcctccatcctgcctagcagctggatcggcgtgttcagaaacagctcccaccatccttgggtcaccatcaacggcctggccttcaagcacgaaatcaaggacagcgaccacgccgagagaaactgcgccatgcttcatgtgcggggcctgatctccgatcagtgtggcagctccagaatcatcagacggggcttcatcatgctgacccggctggtgctcaatagcggtggcggtggctcgggcggtggtgggtcgggtggcggcggatctgaattcgacatcgtgatgacacagagccccgccacactgtcactgtctccaggcgaaagagccacactgagctgtcggagcagcaagagcctccagaacgtgaacggcaacacctacctgtactggttccagcagaagcccggccagtctcctcagctcctgatctacagaatgagcaacctgaacagcggcgtgcccgacagattttctggcagcggaagcggcaccgagttcaccctgaccataagcagcctggaacctgaggacttcgccgtgtactactgtatgcagcacctggaataccccatcaccttcggagccggcaccaagctggaaatcaaaggcggaggcggaagtggaggcggaggatctggcggcggaggctctgaagtgcaactggttgaatctggcggcggactggttaagcctggcggatctctgaagctgagctgtgccgccagcggctacacctttaccagctacgtgatgcactgggtccgacaggcccctggcaaaggacttgagtggatcggctacatcaacccctacaacgatggcaccaagtacaacgagaagttccagggcagagtgaccatcagctccgacaagagcatcagcaccgcctacatggaactgagcagcctgagaagcgaggataccgccatgtactattgcgccagaggcacctactactacggcaccagagtgttcgactactggggccagggaaccctggtcacagtctcttcttaa

SEQ ID NO: 9309 - DNA, 1272 bp, Artificial Sequence
  Synthetic Polynucleotide
atgaacaagcagcggggcacctacagcgaagtgtctctggctcaggaccccaagcggcagcagagaaagctgaagggcaacaagagcagcatcagcggcaccaagcaagagattttccaggtggaactgaacctccagaacgccagcagcgaccaccagggcaacgataagacctaccactgcaagggcctgctgcctcctccagagaaactgacagctgaggtgctgggcatcatctgcatcgtgctgatggctaccgtgctgaaaaccattgtgctgatcccttgcatcggcgtgctggaacagaacagcttcagcctgaaccggcggatgcagaaggccagacactgcggacactgtcccgaggaatggatcacctactccaacagctgctactacatcggcaaagagcggcggacctgggaagaacgagtgtgttggcctgtgctgcggagaaccctgatctgctttctgggtggcggtggctcgggcggtggtgggtcgggtggcggcggatctgaattcgacatcgtgatgacacagagccccgccacactgtcactgtctccaggcgaaagagccacactgagctgtcggagcagcaagagcctccagaacgtgaacggcaacacctacctgtactggttccagcagaagcccggccagtctcctcagctcctgatctacagaatgagcaacctgaacagcggcgtgcccgacagattttctggcagcggaagcggcaccgagttcaccctgaccataagcagcctggaacctgaggacttcgccgtgtactactgtatgcagcacctggaataccccatcaccttcggagccggcaccaagctggaaatcaaaggcggaggcggaagtggaggcggaggatctggcggcggaggctctgaagtgcaactggttgaatctggcggcggactggttaagcctggcggatctctgaagctgagctgtgccgccagcggctacacctttaccagctacgtgatgcactgggtccgacaggcccctggcaaaggacttgagtggatcggctacatcaacccctacaacgatggcaccaagtacaacgagaagttccagggcagagtgaccatcagctccgacaagagcatcagcaccgcctacatggaactgagcagcctgagaagcgaggataccgccatgtactattgcgccagaggcacctactactacggcaccagagtgttcgactactggggccagggaaccctggtcacagtctcttcttaa

SEQ ID NO: 9310 - DNA, 1569 bp, Artificial Sequence
  Synthetic Polynucleotide
atgaacaagcagcggggcaccttcagcgaagtgtctctggctcaggaccccaagcctcagcagagaaagcccaagggcaacaagagcagcatcagcggcaccgagcaagagattttccaggtggaactgaacctccagaacgccagcctgaaccaccagggcatcgacaaaatctacgactgccagggcctgctgcctcctccagaaaaactgacagccgaggtgctgggcatcatctgcatcgtgctgatggctaccgtgctgaaaacgattgtgctgatcccattcctggaacagaacaacagcagccccaacacacggacccagaaggctagaccttgcggacactgtcccgaggaatggatcacctacagcaacagctgctactacatcggcaaagagcggcggacctgggaagagtctcttcaggcttgcgccagcaagaacagcagctccctgctgtccatcgacaacgaggaagagatgaagttcctggcctccatcctgcctagcagctggatcggcgtgttcagaaacagctcccaccatccttgggtcaccatcaacggcctggccttcaagcacgaaatcaaggacagcgaccacgccgagagaaactgcgccatgcttcatgtgcggggcctgatctccgatcagtgtggcagcagcagaatcatcgtgtccatcagcttcaggatcaaggccctggaactggccgtgcaccagatcaagttctacatctgctccaaccggaacgacattatgatcgccggtggcggtggctcgggcggtggtgggtcgggtggcggcggatctgaattcgacatcgtgatgacacagagccccgccacactgtcactgtctccaggcgaaagagccacactgagctgtcggagcagcaagagcctccagaacgtgaacggcaacacctacctgtactggttccagcagaagcccggccagtctcctcagctcctgatctacagaatgagcaacctgaacagcggcgtgcccgacagattttctggcagcggaagcggcaccgagttcaccctgaccataagcagcctggaacctgaggacttcgccgtgtactactgtatgcagcacctggaataccccatcaccttcggagccggcaccaagctggaaatcaaaggcggaggcggaagtggaggcggaggatctggcggcggaggctctgaagtgcaactggttgaatctggcggcggactggttaagcctggcggatctctgaagctgagctgtgccgccagcggctacacctttaccagctacgtgatgcactgggtccgacaggcccctggcaaaggacttgagtggatcggctacatcaacccctacaacgatggcaccaagtacaacgagaagttccagggcagagtgaccatcagctccgacaagagcatcagcaccgcctacatggaactgagcagcctgagaagcgaggataccgccatgtactattgcgccagaggcacctactactacggcaccagagtgttcgactactggggccagggaaccctggtcacagtctcttcttaa

SEQ ID NO: 9311 - DNA, 1497 bp, Artificial Sequence
  Synthetic Polynucleotide
atggacaaccagggcgtgatctacagcgacctgaacctgcctcctaatcctaagcggcagcagagaaagcccaagggcaacaagagcagcatcctggctaccgagcaagagatcacctacgccgagctgaacctccagaaggccagccaggatttccagggcaacgacaagacctaccactgcaaggacctgcctagcgcacccgagaagctgatcgttggcatcctgggcatcatctgcctgatcctgatggcctccgtggtcaccatcgtggtcatccccagcacactgatccagcggcacaacaacagcagcctgaacaccagaacacagaaggcccggcactgcggccactgtcctgaagagtggatcacatacagcaacagctgctactacatcggcaaagagcggcggacctgggaagaatctctgctggcctgcaccagcaagaacagctccctgctgagcatcgacaacgaggaagagatgaagttcctgtccatcatcagccccagcagctggatcggcgtgttcagaaactccagccaccatccttgggtcaccatgaacggcctggccttcaagcacgaaatcaaggacagcgacaacgccgaactgaattgcgccgtgctgcaagtgaaccggctgaagtctgcccagtgtggcagcagcatcatctatcactgcaagcacaagctgggtggcggtggctcgggcggtggtgggtcgggtggcggcggatctgaattcgacatcgtgatgacacagagccccgccacactgtcactgtctccaggcgaaagagccacactgagctgtcggagcagcaagagcctccagaacgtgaacggcaacacctacctgtactggttccagcagaagcccggccagtctcctcagctcctgatctacagaatgagcaacctgaacagcggcgtgcccgacagattttctggcagcggaagcggcaccgagttcaccctgaccataagcagcctggaacctgaggacttcgccgtgtactactgtatgcagcacctggaataccccatcaccttcggagccggcaccaagctggaaatcaaaggcggaggcggaagtggaggcggaggatctggcggcggaggctctgaagtgcaactggttgaatctggcggcggactggttaagcctggcggatctctgaagctgagctgtgccgccagcggctacacctttaccagctacgtgatgcactgggtccgacaggcccctggcaaaggacttgagtggatcggctacatcaacccctacaacgatggcaccaagtacaacgagaagttccagggcagagtgaccatcagctccgacaagagcatcagcaccgcctacatggaactgagcagcctgagaagcgaggataccgccatgtactattgcgccagaggcacctactactacggcaccagagtgttcgactactggggccagggaaccctggtcacagtctcttcttaa

SEQ ID NO: 9312 - DNA, 1569 bp, Artificial Sequence
  Synthetic Polynucleotide
atggccttaccagtgaccgccttgctcctgccgctggccttgctgctccacgccgccaggccggacatccagatgacacagagccctagcagcctgtctgccagcgtgggagacagagtgaccatcacatgcaaggccagcgaccacatcaacaactggctggcctggtatcagcagaagcctggacaggcccctaagctgctgatctacggcgctaccacactggaaacaggcgtgcccagcagattttctggcagcggctctggcaccgactacaccctgacaatatccagcctccagcctgaggacttcgccacctactactgtcagcagagctggaacaccccttggacattcggccagggcaccaagctggaaatcaagagaggcggaggcggaagtggaggcggaggatctggcggcggaggctctcaagttcagcttcaacagcctggcgctgagctggtcaaacctggcgcttctgtgaagatgagctgcaaagccagcggctacgccttcagcagctactggatcaactggatgaagcagaaacccggccagggactcgaatggatcggccaaatctatcccggcgacggcgacaccaactacaacggcaagttcaagggcagagccacactgaccgccgatacctctagcagcacagcctacatgcagctgagcagcctgaccagcgaagatagcgccgtgtacttctgtgcccggtccatcacaacagtcgtgggctgcgctatggactattggggccagggaacaagcgtgaccgtgtctagtacgcgtaaaattgaagttatgtatcctcctccttacctagacaatgagaagagcaatggaaccattatccatgtgaaagggggtaccgtcgtctttctcgaaccccaatggtatcgggtgctcgaaaaagactctgtgacactgaaatgccaaggggcctactctcccgaggacaactccacacagtggtttcataatgagtccctcatcagctctcaggccagctcttatttcattgatgccgctacagtggacgactccggcgagtatcggtgtcagaccaatctgtctacactgtctgaccccgtgcagcttgaggtccacattggatggttgctcttgcaagccccacgctgggttttcaaagaggaagatccaatccatctgcggtgccacagctggaaaaacaccgctctccacaaagtcacatacctgcaaaatggcaaaggacgcaaatacttccatcacaattccgatttttacattccgaaggctaccctgaaagacagcggcagctatttctgccggggactcgtcggctccaagaatgtgtcctccgaaaccgtgaatatcacgattacccaaggactggctgtgcctacaatctctagcttctttccgcctggataccaagtctccttctgtcttgtgatggtcctcctgtttgctgtggacacaggactgtacttttccgtgaaaacgaacatccgcagctccacacgcgattggaaagatcacaagtttaaatggcgcaaagatccccaggacaagtaa

SEQ ID NO: 9313 - DNA, 1176 bp, Artificial Sequence
  Synthetic Polynucleotide
atggccttaccagtgaccgccttgctcctgccgctggccttgctgctccacgccgccaggccggacatccagatgacacagagccctagcagcctgtctgccagcgtgggagacagagtgaccatcacatgcaaggccagcgaccacatcaacaactggctggcctggtatcagcagaagcctggacaggcccctaagctgctgatctacggcgctaccacactggaaacaggcgtgcccagcagattttctggcagcggctctggcaccgactacaccctgacaatatccagcctccagcctgaggacttcgccacctactactgtcagcagagctggaacaccccttggacattcggccagggcaccaagctggaaatcaagagaggcggaggcggaagtggaggcggaggatctggcggcggaggctctcaagttcagcttcaacagcctggcgctgagctggtcaaacctggcgcttctgtgaagatgagctgcaaagccagcggctacgccttcagcagctactggatcaactggatgaagcagaaacccggccagggactcgaatggatcggccaaatctatcccggcgacggcgacaccaactacaacggcaagttcaagggcagagccacactgaccgccgatacctctagcagcacagcctacatgcagctgagcagcctgaccagcgaagatagcgccgtgtacttctgtgcccggtccatcacaacagtcgtgggctgcgctatggactattggggccagggaacaagcgtgaccgtgtctagtacgcgtaaaattgaagttatgtatcctcctccttacctagacaatgagaagagcaatggaaccattatccatgtgaaagggggtaccctgcaagtcctgggccttcagctgccaactccagtgtggtttcatgtcctgttctatctggctgtggggattatgttccttgtgaataccgtgctctgggttaccattcggaaagaactcaagcgcaagaaaaaatgggatcttgagataagcctggacagcgggcatgagaagaaagtcatcagttcccttcaagaggacagacatctcgaagaggaactcaaatgtcaagaacaaaaagaagaacaactccaagagggtgtccatcggaaagagccacagggcgctacataa

SEQ ID NO: 9314 - DNA, 1176 bp, Artificial Sequence
  Synthetic Polynucleotide
atggccttaccagtgaccgccttgctcctgccgctggccttgctgctccacgccgccaggccggacatccagatgacacagagccctagcagcctgtctgccagcgtgggagacagagtgaccatcacatgcaaggccagcgaccacatcaacaactggctggcctggtatcagcagaagcctggacaggcccctaagctgctgatctacggcgctaccacactggaaacaggcgtgcccagcagattttctggcagcggctctggcaccgactacaccctgacaatatccagcctccagcctgaggacttcgccacctactactgtcagcagagctggaacaccccttggacattcggccagggcaccaagctggaaatcaagagaggcggaggcggaagtggaggcggaggatctggcggcggaggctctcaagttcagcttcaacagcctggcgctgagctggtcaaacctggcgcttctgtgaagatgagctgcaaagccagcggctacgccttcagcagctactggatcaactggatgaagcagaaacccggccagggactcgaatggatcggccaaatctatcccggcgacggcgacaccaactacaacggcaagttcaagggcagagccacactgaccgccgatacctctagcagcacagcctacatgcagctgagcagcctgaccagcgaagatagcgccgtgtacttctgtgcccggtccatcacaacagtcgtgggctgcgctatggactattggggccagggaacaagcgtgaccgtgtctagtacgcgtaaaattgaagttatgtatcctcctccttacctagacaatgagaagagcaatggaaccattatccatgtgaaagggggtaccgttcaggctcccagcagctccccaatgggcattattgtggccgtcgtgaccggaattgctgtggccgcaatcgtggcagctgtcgtcgctctgatctattgcagaaagaagcggatcagcgccctgccagggtatcctgagtgccgcgaaatgggcgaaactctgcctgagaaacctgctaaccccacaaatcccgatgaagctgacaaagtcggcgctgaaaacacgatcacatactccctgctcatgcatcctgacgctcttgaggaacctgacgatcagaaccggatctaa

SEQ ID NO: 9315 - DNA, 1224 bp, Artificial Sequence
  Synthetic Polynucleotide
atggccttaccagtgaccgccttgctcctgccgctggccttgctgctccacgccgccaggccggacatccagatgacacagagccctagcagcctgtctgccagcgtgggagacagagtgaccatcacatgcaaggccagcgaccacatcaacaactggctggcctggtatcagcagaagcctggacaggcccctaagctgctgatctacggcgctaccacactggaaacaggcgtgcccagcagattttctggcagcggctctggcaccgactacaccctgacaatatccagcctccagcctgaggacttcgccacctactactgtcagcagagctggaacaccccttggacattcggccagggcaccaagctggaaatcaagagaggcggaggcggaagtggaggcggaggatctggcggcggaggctctcaagttcagcttcaacagcctggcgctgagctggtcaaacctggcgcttctgtgaagatgagctgcaaagccagcggctacgccttcagcagctactggatcaactggatgaagcagaaacccggccagggactcgaatggatcggccaaatctatcccggcgacggcgacaccaactacaacggcaagttcaagggcagagccacactgaccgccgatacctctagcagcacagcctacatgcagctgagcagcctgaccagcgaagatagcgccgtgtacttctgtgcccggtccatcacaacagtcgtgggctgcgctatggactattggggccagggaacaagcgtgaccgtgtctagtacgcgtctgtgggtgtcccagccacctgaaattcggacactggaaggctcctccgcctttctgccctgtagctttaacgccagccaggggagactcgccatcggctctgtgacatggttccgggatgaagtcgtccctggaaaagaagttcgcaacggaacaccagagttcagaggcagactcgccccactggcaagctccagattcctgcatgaccatcaggctgaactgcacattagggacgtgcggggccacgatgcctccatctatgtgtgtcgggtcgaagtgcttggactcggcgtcggaactggaaacggcactaggctggtggtcgagaaagaacatccacagcttggcgctggcaccgtcctgttgcttagagccggattctatgccgtcagcttcctgtccgtggctgtggggtcttaa

SEQ ID NO: 9316 - DNA, 1884 bp, Artificial Sequence
  Synthetic Polynucleotide
atggccttaccagtgaccgccttgctcctgccgctggccttgctgctccacgccgccaggccggacatccagatgacacagagccctagcagcctgtctgccagcgtgggagacagagtgaccatcacatgcaaggccagcgaccacatcaacaactggctggcctggtatcagcagaagcctggacaggcccctaagctgctgatctacggcgctaccacactggaaacaggcgtgcccagcagattttctggcagcggctctggcaccgactacaccctgacaatatccagcctccagcctgaggacttcgccacctactactgtcagcagagctggaacaccccttggacattcggccagggcaccaagctggaaatcaagagaggcggaggcggaagtggaggcggaggatctggcggcggaggctctcaagttcagcttcaacagcctggcgctgagctggtcaaacctggcgcttctgtgaagatgagctgcaaagccagcggctacgccttcagcagctactggatcaactggatgaagcagaaacccggccagggactcgaatggatcggccaaatctatcccggcgacggcgacaccaactacaacggcaagttcaagggcagagccacactgaccgccgatacctctagcagcacagcctacatgcagctgagcagcctgaccagcgaagatagcgccgtgtacttctgtgcccggtccatcacaacagtcgtgggctgcgctatggactattggggccagggaacaagcgtgaccgtgtctagtacgcgtcaagtggtggacacaacaaaagccgtcatcaccctgcaaccaccttgggtttcagtctttcaagaagagacagttaccctgcactgtgaagtcctgcacttgcccggaagcagctccacacagtggttcctcaacggcacagctacccagacaagcaccccttcctaccggatcacatctgcctccgtgaacgattccggcgagtataggtgtcagaggggcctgtctggccgcagcgatcctatccagcttgagattcatcgtggatggttgctcctccaagtgtcctccagggtgttcaccgaaggcgaacctctggcactgaggtgccatgcttggaaagataagctcgtctacaatgtcctctactaccgcaatggcaaggcttttaagttttttcattggaactctaatctcacgatcctgaaaacgaacatctcccacaatgggacataccactgctctggcatgggaaaacatcggtacacctctgccggcatctctgtcacagtcaaagaactgttccctgcaccagtcctgaacgcttccgtgacctctccactgcttgagggaaatctggtcaccctgtcctgcgaaactaagttgctgcttcagaggcccggactccagctctacttttcattctatatgggctctaagaccctgagaggccggaacaccagcagcgaatatcagattctgacagctcggcgcgaggactccgggctctattggtgtgaagctgctacagaggacggaaacgtgctgaaacggtcccctgaactggaactgcaagtcctgggccttcagctgccaactccagtgtggtttcatgtcctgttctatctggctgtggggattatgttccttgtgaataccgtgctctgggttaccattcggaaagaactcaagcgcaagaaaaaatgggatcttgagataagcctggacagcgggcatgagaagaaagtcatcagttcccttcaagaggacagacatctcgaagaggaactcaaatgtcaagaacaaaaagaagaacaactccaagagggtgtccatcggaaagagccacagggcgctacataa

SEQ ID NO: 9317 - DNA, 1548 bp, Artificial Sequence
  Synthetic Polynucleotide
atggccttaccagtgaccgccttgctcctgccgctggccttgctgctccacgccgccaggccggacatccagatgacacagagccctagcagcctgtctgccagcgtgggagacagagtgaccatcacatgcaaggccagcgaccacatcaacaactggctggcctggtatcagcagaagcctggacaggcccctaagctgctgatctacggcgctaccacactggaaacaggcgtgcccagcagattttctggcagcggctctggcaccgactacaccctgacaatatccagcctccagcctgaggacttcgccacctactactgtcagcagagctggaacaccccttggacattcggccagggcaccaagctggaaatcaagagaggcggaggcggaagtggaggcggaggatctggcggcggaggctctcaagttcagcttcaacagcctggcgctgagctggtcaaacctggcgcttctgtgaagatgagctgcaaagccagcggctacgccttcagcagctactggatcaactggatgaagcagaaacccggccagggactcgaatggatcggccaaatctatcccggcgacggcgacaccaactacaacggcaagttcaagggcagagccacactgaccgccgatacctctagcagcacagcctacatgcagctgagcagcctgaccagcgaagatagcgccgtgtacttctgtgcccggtccatcacaacagtcgtgggctgcgctatggactattggggccagggaacaagcgtgaccgtgtctagtacgcgtcaagagggcgtgcacagaaagcccagctttctggctctgcctggacacctggtcaagagcgaagagacagtgatcctccagtgttggagcgacgtgatgttcgagcactttctgctgcacagagagggcaagttcaacaacaccctgcacctgatcggcgagcaccatgatggcgtgtccaaggccaatttcagcatcggccccatgatgcctgtgctggccggcacctatagatgctacggatctgtgcctcacagcccctaccagctgtctgccccttctgaccctctggacatggttatcatcggcctgtacgagaagcccagcctgtctgctcaacctggacctacagttcaggccggcgagaacgtgacactgagctgtagcagcagatccagctacgacatgtaccacctgagcagagaaggcgaggcccacgaacgtagacttccagccgtgcggagcatcaacggcaccttccaggccgattttccactgggacctgccacacacggcggcacatacagatgcttcggcagcttcagagatgccccttacgagtggtccaacagcagcgatcctctgctggtgtccgtgaccggcaatcccagcaatagctggccctctccaacagagcccagcagcaagacaggcaaccccagacatctgcacgtgctgatcggaaccagcgtggtcaagatcccctttacaatcctgctgttctttctgctccatcggtggtgctaa

SEQ ID NO: 9318 - DNA, 1137 bp, Artificial Sequence
  Synthetic Polynucleotide
atggccttaccagtgaccgccttgctcctgccgctggccttgctgctccacgccgccaggccggacatccagatgacacagagccctagcagcctgtctgccagcgtgggagacagagtgaccatcacatgcaaggccagcgaccacatcaacaactggctggcctggtatcagcagaagcctggacaggcccctaagctgctgatctacggcgctaccacactggaaacaggcgtgcccagcagattttctggcagcggctctggcaccgactacaccctgacaatatccagcctccagcctgaggacttcgccacctactactgtcagcagagctggaacaccccttggacattcggccagggcaccaagctggaaatcaagagaggcggaggcggaagtggaggcggaggatctggcggcggaggctctcaagttcagcttcaacagcctggcgctgagctggtcaaacctggcgcttctgtgaagatgagctgcaaagccagcggctacgccttcagcagctactggatcaactggatgaagcagaaacccggccagggactcgaatggatcggccaaatctatcccggcgacggcgacaccaactacaacggcaagttcaagggcagagccacactgaccgccgatacctctagcagcacagcctacatgcagctgagcagcctgaccagcgaagatagcgccgtgtacttctgtgcccggtccatcacaacagtcgtgggctgcgctatggactattggggccagggaacaagcgtgaccgtgtctagtacgcgtaccacgacgccagcgccgcgaccaccaacaccggcgcccaccatcgcgtcgcagcccctgtccctgcgcccagaggcgtgccggccagcggcggggggcgcagtgcacacgagggggctggacttcgcctgtgacatctacatctgggcgcccttggccgggacttgtggggtccttctcctgtcactggttatcaccctttactgcaaacggggcagaaagaaactcctgtatatattcaaacaaccatttatgagaccagtacaaactactcaagaggaagatggctgtagctgccgatttccagaagaagaagaaggaggatgtgaactgtga

SEQ ID NO: 9319 - DNA, 1680 bp, Artificial Sequence
  Synthetic Polynucleotide
atggccttaccagtgaccgccttgctcctgccgctggccttgctgctccacgccgccaggccggacatccagatgacacagagccctagcagcctgtctgccagcgtgggagacagagtgaccatcacatgcaaggccagcgaccacatcaacaactggctggcctggtatcagcagaagcctggacaggcccctaagctgctgatctacggcgctaccacactggaaacaggcgtgcccagcagattttctggcagcggctctggcaccgactacaccctgacaatatccagcctccagcctgaggacttcgccacctactactgtcagcagagctggaacaccccttggacattcggccagggcaccaagctggaaatcaagagaggcggaggcggaagtggaggcggaggatctggcggcggaggctctcaagttcagcttcaacagcctggcgctgagctggtcaaacctggcgcttctgtgaagatgagctgcaaagccagcggctacgccttcagcagctactggatcaactggatgaagcagaaacccggccagggactcgaatggatcggccaaatctatcccggcgacggcgacaccaactacaacggcaagttcaagggcagagccacactgaccgccgatacctctagcagcacagcctacatgcagctgagcagcctgaccagcgaagatagcgccgtgtacttctgtgcccggtccatcacaacagtcgtgggctgcgctatggactattggggccagggaacaagcgtgaccgtgtctagtacgcgtggcatgagaaccgaggacctgcctaaggccgtggtgttcctggaaccccagtggtacagagtgctggaaaaggacagcgtgaccctgaagtgccagggcgcctacagccccgaggacaatagcacccagtggttccacaacgagagcctgatctccagccaggccagcagctacttcatcgacgccgccaccgtggacgacagcggcgagtatagatgccagaccaacctgagcaccctgagcgaccccgtgcagctggaagtgcacatcggatggctgctgctgcaggcccccagatgggtgttcaaagaagaggaccccatccacctgagatgccactcttggaagaacaccgccctgcacaaagtgacctacctgcagaacggcaagggcagaaagtacttccaccacaacagcgacttctacatccccaaggccaccctgaaggactccggctcctacttctgcagaggcctcgtgggcagcaagaacgtgtccagcgagacagtgaacatcaccatcacccagggcctggccgtgtctaccatcagcagctttttcccacccggctaccaggtgtccttctgcctcgtgatggtgctgctgttcgccgtggacaccggcctgtacttcagcgtgaaaggatccgtggtggaaaaagagcaccctcagctcggagccggaacagtgctgcttctgagagccggcttttacgccgtgtcctttctgtctgtggccgtgggcagcaccgtgtactatcagggcaagtgcctgacctggaagggacctagaaggcaactgcctgctgtggtgcctgctcctttgcctcctccatgtggaagctctgcccatctgctgccacctgttccaggcggataa

SEQ ID NO: 9320 - DNA, 1665 bp, Artificial Sequence
  Synthetic Polynucleotide
atggccttaccagtgaccgccttgctcctgccgctggccttgctgctccacgccgccaggccggacatccagatgacacagagccctagcagcctgtctgccagcgtgggagacagagtgaccatcacatgcaaggccagcgaccacatcaacaactggctggcctggtatcagcagaagcctggacaggcccctaagctgctgatctacggcgctaccacactggaaacaggcgtgcccagcagattttctggcagcggctctggcaccgactacaccctgacaatatccagcctccagcctgaggacttcgccacctactactgtcagcagagctggaacaccccttggacattcggccagggcaccaagctggaaatcaagagaggcggaggcggaagtggaggcggaggatctggcggcggaggctctcaagttcagcttcaacagcctggcgctgagctggtcaaacctggcgcttctgtgaagatgagctgcaaagccagcggctacgccttcagcagctactggatcaactggatgaagcagaaacccggccagggactcgaatggatcggccaaatctatcccggcgacggcgacaccaactacaacggcaagttcaagggcagagccacactgaccgccgatacctctagcagcacagcctacatgcagctgagcagcctgaccagcgaagatagcgccgtgtacttctgtgcccggtccatcacaacagtcgtgggctgcgctatggactattggggccagggaacaagcgtgaccgtgtctagtacgcgtgacctgcctaaggccgtggtgttcctggaaccccagtggtacagagtgctggaaaaggacagcgtgaccctgaagtgccagggcgcctacagccccgaggacaatagcacccagtggttccacaacgagagcctgatctccagccaggccagcagctacttcatcgacgccgccaccgtggacgacagcggcgagtatagatgccagaccaacctgagcaccctgagcgaccccgtgcagctggaagtgcacatcggatggctgctgctgcaggcccccagatgggtgttcaaagaagaggaccccatccacctgagatgccactcttggaagaacaccgccctgcacaaagtgacctacctgcagaacggcaagggcagaaagtacttccaccacaacagcgacttctacatccccaaggccaccctgaaggactccggctcctacttctgcagaggcctcgtgggcagcaagaacgtgtccagcgagacagtgaacatcaccatcacccagggcctggccgtgtctaccatcagcagctttttcccacccggctaccaggtgtccttctgcctcgtgatggtgctgctgttcgccgtggacaccggcctgtacttcagcgtgaaaggatccgtggtggaaaaagagcaccctcagctcggagccggaacagtgctgcttctgagagccggcttttacgccgtgtcctttctgtctgtggccgtgggcagcaccgtgtactatcagggcaagtgcctgacctggaagggacctagaaggcaactgcctgctgtggtgcctgctcctttgcctcctccatgtggaagctctgcccatctgctgccacctgttccaggcggataa

SEQ ID NO: 9321 - DNA, 1452 bp, Artificial Sequence
  Synthetic Polynucleotide
atggccttaccagtgaccgccttgctcctgccgctggccttgctgctccacgccgccaggccggacatccagatgacacagagccctagcagcctgtctgccagcgtgggagacagagtgaccatcacatgcaaggccagcgaccacatcaacaactggctggcctggtatcagcagaagcctggacaggcccctaagctgctgatctacggcgctaccacactggaaacaggcgtgcccagcagattttctggcagcggctctggcaccgactacaccctgacaatatccagcctccagcctgaggacttcgccacctactactgtcagcagagctggaacaccccttggacattcggccagggcaccaagctggaaatcaagagaggcggaggcggaagtggaggcggaggatctggcggcggaggctctcaagttcagcttcaacagcctggcgctgagctggtcaaacctggcgcttctgtgaagatgagctgcaaagccagcggctacgccttcagcagctactggatcaactggatgaagcagaaacccggccagggactcgaatggatcggccaaatctatcccggcgacggcgacaccaactacaacggcaagttcaagggcagagccacactgaccgccgatacctctagcagcacagcctacatgcagctgagcagcctgaccagcgaagatagcgccgtgtacttctgtgcccggtccatcacaacagtcgtgggctgcgctatggactattggggccagggaacaagcgtgaccgtgtctagtacgcgtctgtgggtgtcccagccacctgaaattcggacactggaaggctcctccgcctttctgccctgtagctttaacgccagccaggggagactcgccatcggctctgtgacatggttccgggatgaagtcgtccctggaaaagaagttcgcaacggaacaccagagttcagaggcagactcgccccactggcaagctccagattcctgcatgaccatcaggctgaactgcacattagggacgtgcggggccacgatgcctccatctatgtgtgtcgggtcgaagtgcttggactcggcgtcggaactggaaacggcactaggctggtggtcgagaaagaacatccacagcttggcgctggcaccgtcctgttgcttagagccggattctatgccgtcagcttcctgtccgtggctgtgggatccgtggtggaaaaagagcaccctcagctcggagccggaacagtgctgcttctgagagccggcttttacgccgtgtcctttctgtctgtggccgtgggcagcaccgtgtactatcagggcaagtgcctgacctggaagggacctagaaggcaactgcctgctgtggtgcctgctcctttgcctcctccatgtggaagctctgcccatctgctgccacctgttccaggcggataa

SEQ ID NO: 9322 - DNA, 2406 bp, Artificial Sequence
  Synthetic Polynucleotide
atggccttaccagtgaccgccttgctcctgccgctggccttgctgctccacgccgccaggccggacatccagatgacacagagccctagcagcctgtctgccagcgtgggagacagagtgaccatcacatgcaaggccagcgaccacatcaacaactggctggcctggtatcagcagaagcctggacaggcccctaagctgctgatctacggcgctaccacactggaaacaggcgtgcccagcagattttctggcagcggctctggcaccgactacaccctgacaatatccagcctccagcctgaggacttcgccacctactactgtcagcagagctggaacaccccttggacattcggccagggcaccaagctggaaatcaagagaggcggaggcggaagtggaggcggaggatctggcggcggaggctctcaagttcagcttcaacagcctggcgctgagctggtcaaacctggcgcttctgtgaagatgagctgcaaagccagcggctacgccttcagcagctactggatcaactggatgaagcagaaacccggccagggactcgaatggatcggccaaatctatcccggcgacggcgacaccaactacaacggcaagttcaagggcagagccacactgaccgccgatacctctagcagcacagcctacatgcagctgagcagcctgaccagcgaagatagcgccgtgtacttctgtgcccggtccatcacaacagtcgtgggctgcgctatggactattggggccagggaacaagcgtgaccgtgtctagtacgcgtgcgaagcccaccacgacgccagctcctagacctcctacaccagctcctacaatcgccagccagcctctgtctctcagacccgaagcctgtagacctgctgctggcggagctgtgcataccagaggactggatttcgcctgcgacagcaacctgtttgtggcctcttggatcgccgtgatgattatcttcagaatcggaatggccgtggctatcttctgctgcttcttcttcccatcctggcggcggaagcggaaagagaagcagtctgagacaagccccaaagagttcctgaccatctacgaggacgtgaaggacctgaaaacccggcggaaccacgaacaagagcagacctttcctggcggaggcagcaccatctacagcatgatccagagccagagcagcgcccctacaagccaagagcctgcctacacactgtactccctgatccagcctagcagaaagagcggcagccggaagagaaatcacagccccagcttcaacagcacgatctacgaagtgatcggcaagagccagccaaaggctcagaaccctgccagactgagccggaaagagctggaaaacttcgacgtgtacagcagagtgaagttcagcaggagcgcagacgcccccgcgtaccagcagggccagaaccagctctataacgagctgaatctaggacgaagagaggagtacgatgttttggacaagagacgtggccgggaccctgagatggggggaaagccgagaaggaagaaccctcaggaaggcctgtacaatgaactgcagaaagataagatggcggaggcctacagtgagattgggatgaaaggcgagcgccggaggggcaaggggcacgatggcctttaccagggtctcagtacagccaccaaggacacctacgacgcccttcacatgcaggccctgcctccacgctctagtggctccggcgagggcagaggaagtctactaacctgcggagatgtggaagaaaatcctggcccacatatgaccgagtacaagcccacggtgcgcctcgccacccgcgacgacgtccccagggccgtacgcaccctcgccgccgcgttcgccgactaccccgccacgcgccacaccgtcgatccggaccgccacatcgagcgggtcaccgagctgcaagaactcttcctcacgcgcgtcgggctcgacatcggcaaggtgtgggtcgcggacgacggcgccgcggtggcggtctggaccacgccggagagcgtcgaagcgggggcggtgttcgccgagatcggcccgcgcatggccgagttgagcggttcccggctggccgcgcagcaacagatggaaggcctcctggcgccgcaccggcccaaggagcccgcgtggttcctggccaccgtcggcgtctcgcccgaccaccagggcaagggtctgggcagcgccgtcgtgctccccggagtggaggcggccgagcgcgccggggtgcccgccttcctggagacctccgcgccccgcaacctccccttctacgagcggctcggcttcaccgtcaccgccgacgtcgaggtgcccgaaggaccgcgcacctggtgcatgacccgcaagcccggtgcctga

SEQ ID NO: 9323 - DNA, 2352 bp, Artificial Sequence
  Synthetic Polynucleotide
atggccttaccagtgaccgccttgctcctgccgctggccttgctgctccacgccgccaggccggacatccagatgacacagagccctagcagcctgtctgccagcgtgggagacagagtgaccatcacatgcaaggccagcgaccacatcaacaactggctggcctggtatcagcagaagcctggacaggcccctaagctgctgatctacggcgctaccacactggaaacaggcgtgcccagcagattttctggcagcggctctggcaccgactacaccctgacaatatccagcctccagcctgaggacttcgccacctactactgtcagcagagctggaacaccccttggacattcggccagggcaccaagctggaaatcaagagaggcggaggcggaagtggaggcggaggatctggcggcggaggctctcaagttcagcttcaacagcctggcgctgagctggtcaaacctggcgcttctgtgaagatgagctgcaaagccagcggctacgccttcagcagctactggatcaactggatgaagcagaaacccggccagggactcgaatggatcggccaaatctatcccggcgacggcgacaccaactacaacggcaagttcaagggcagagccacactgaccgccgatacctctagcagcacagcctacatgcagctgagcagcctgaccagcgaagatagcgccgtgtacttctgtgcccggtccatcacaacagtcgtgggctgcgctatggactattggggccagggaacaagcgtgaccgtgtctagtacgcgtcaagagggcgtgcacagaaagcccagctttctggctctgcctggacacctggtcaagagcgaagagacagtgatcctccagtgttggagcgacgtgatgttcgagcactttctgctgcacagagagggcaagttcaacaacaccctgcacctgatcggcgagcaccatgatggcgtgtccaaggccaatttcagcatcggccccatgatgcctgtgctggccggcacctatagatgctacggatctgtgcctcacagcccctaccagctgtctgccccttctgaccctctggacatggttatcatcggcctgtacgagaagcccagcctgtctgctcaacctggacctacagttcaggccggcgagaacgtgacactgagctgtagcagcagatccagctacgacatgtaccacctgagcagagaaggcgaggcccacgaacgtagacttccagccgtgcggagcatcaacggcaccttccaggccgattttccactgggacctgccacacacggcggcacatacagatgcttcggcagcttcagagatgccccttacgagtggtccaacagcagcgatcctctgctggtgtccgtgaccggcaatcccagcaatagctggccctctccaacagagcccagcagcaagacaggcaaccccagacatctgcacgtgctgatcggaaccagcgtggtcaagatcccctttacaatcctgctgttctttctgctccatcggtggtgcagcgacaagaaaaacgccgccgtgatggaccaagagcctgccggcaatagaaccgtgaacagcgaggatagcgacgagcaggaccaccaagaggtgtcctatgctcgcgccaagagaagcggatctggcgtgaagcagaccctgaatttcgacctgctgaagctggctggcgacgtggaatccaacccaggcccttctagaggccatatgaccgagtacaagcccacggtgcgcctcgccacccgcgacgacgtccccagggccgtacgcaccctcgccgccgcgttcgccgactaccccgccacgcgccacaccgtcgatccggaccgccacatcgagcgggtcaccgagctgcaagaactcttcctcacgcgcgtcgggctcgacatcggcaaggtgtgggtcgcggacgacggcgccgcggtggcggtctggaccacgccggagagcgtcgaagcgggggcggtgttcgccgagatcggcccgcgcatggccgagttgagcggttcccggctggccgcgcagcaacagatggaaggcctcctggcgccgcaccggcccaaggagcccgcgtggttcctggccaccgtcggcgtctcgcccgaccaccagggcaagggtctgggcagcgccgtcgtgctccccggagtggaggcggccgagcgcgccggggtgcccgccttcctggagacctccgcgccccgcaacctccccttctacgagcggctcggcttcaccgtcaccgccgacgtcgaggtgcccgaaggaccgcgcacctggtgcatgacccgcaagcccggtgcctga

SEQ ID NO: 9324 - DNA, 1473 bp, Artificial Sequence
  Synthetic Polynucleotide
atggccttaccagtgaccgccttgctcctgccgctggccttgctgctccacgccgccaggccgcaggtgcagctggttgaatctggcggaggactggttcagcctggcggatctctgagactgtcttgtgccgccagcggcttcaccttcaccaatcacgccatgagctgggtccgacaggcccctggaaaaggactggaactggtgtctagcatcagcggcaacggcagaaccacctactacgccgatagcgtgaagggcagattcaccatcagccgggacatcagcaagaacaccctggacctccagatgaacagcctgagagccgaggataccgccgtgtactactgtgccaaggatggcggagagacactggtggatagcagaggccagggcacactggtcacagtgtcatctctcgagaaaattgaagttatgtatcctcctccttacctagacaatgagaagagcaatggaaccattatccatgtgaaaggatccgtcgagaaagaacatccacagcttggcgctggcaccgtcctgttgcttagagccggattctatgccgtcagcttcctgtccgtggctgtgtggtggggcgatatttggtggaaaacgatgatggaattgagatccctcgatacgcagaaagccacatgccaccttcagcaagtcacagacttgccttggaccagcgtcagctctcccgtggaacgggaaattctgtatcatacagtggcccgcaccaagatttccgacgatgacgacgagcacacactgagggccaagcgatctggatctggagcaacaaacttctcactactcaaacaagcaggtgacgtggaggagaatcccgggcctactagaggccatatgaccgagtacaagcccacggtgcgcctcgccacccgcgacgacgtccccagggccgtacgcaccctcgccgccgcgttcgccgactaccccgccacgcgccacaccgtcgatccggaccgccacatcgagcgggtcaccgagctgcaagaactcttcctcacgcgcgtcgggctcgacatcggcaaggtgtgggtcgcggacgacggcgccgcggtggcggtctggaccacgccggagagcgtcgaagcgggggcggtgttcgccgagatcggcccgcgcatggccgagttgagcggttcccggctggccgcgcagcaacagatggaaggcctcctggcgccgcaccggcccaaggagcccgcgtggttcctggccaccgtcggcgtctcgcccgaccaccagggcaagggtctgggcagcgccgtcgtgctccccggagtggaggcggccgagcgcgccggggtgcccgccttcctggagacctccgcgccccgcaacctccccttctacgagcggctcggcttcaccgtcaccgccgacgtcgaggtgcccgaaggaccgcgcacctggtgcatgacccgcaagcccggtgcctga

SEQ ID NO: 9325 - DNA, 2391 bp, Artificial Sequence; identical to SEQ ID NO: 9284
  Synthetic Polynucleotide

SEQ ID NO: 9326 - DNA, 1812 bp, Artificial Sequence
  Synthetic Polynucleotide
atggccttaccagtgaccgccttgctcctgccgctggccttgctgctccacgccgccaggccggacatccagatgacacagagccctagcagcctgtctgccagcgtgggagacagagtgaccatcacatgcaaggccagcgaccacatcaacaactggctggcctggtatcagcagaagcctggacaggcccctaagctgctgatctacggcgctaccacactggaaacaggcgtgcccagcagattttctggcagcggctctggcaccgactacaccctgacaatatccagcctccagcctgaggacttcgccacctactactgtcagcagagctggaacaccccttggacattcggccagggcaccaagctggaaatcaagagaggcggaggcggaagtggaggcggaggatctggcggcggaggctctcaagttcagcttcaacagcctggcgctgagctggtcaaacctggcgcttctgtgaagatgagctgcaaagccagcggctacgccttcagcagctactggatcaactggatgaagcagaaacccggccagggactcgaatggatcggccaaatctatcccggcgacggcgacaccaactacaacggcaagttcaagggcagagccacactgaccgccgatacctctagcagcacagcctacatgcagctgagcagcctgaccagcgaagatagcgccgtgtacttctgtgcccggtccatcacaacagtcgtgggctgcgctatggactattggggccagggaacaagcgtgaccgtgtctagtacgcgtaaaattgaagttatgtatcctcctccttacctagacaatgagaagagcaatggaaccattatccatgtgaaagggggtaccgtggtcgagaaagaacatccacagcttggcgctggcaccgtcctgttgcttagagccggattctatgccgtcagcttcctgtccgtggctgtggggtctacagtgtattaccagggaaaatgtctcacctggaaaggccccagacgccagcttccagctgttgttcctgctccactgccaccaccttgtggctcctctgctcacttgcttccaccagtgcctggcggacgcgccaagagaagcggatctggcatgaagcagaccctgaatttcgacctgctgaagctggctggcgacgtggaatccaacccaggcccttctagaggccatatgaccgagtacaagcccacggtgcgcctcgccacccgcgacgacgtccccagggccgtacgcaccctcgccgccgcgttcgccgactaccccgccacgcgccacaccgtcgatccggaccgccacatcgagcgggtcaccgagctgcaagaactcttcctcacgcgcgtcgggctcgacatcggcaaggtgtgggtcgcggacgacggcgccgcggtggcggtctggaccacgccggagagcgtcgaagcgggggcggtgttcgccgagatcggcccgcgcatggccgagttgagcggttcccggctggccgcgcagcaacagatggaaggcctcctggcgccgcaccggcccaaggagcccgcgtggttcctggccaccgtcggcgtctcgcccgaccaccagggcaagggtctgggcagcgccgtcgtgctccccggagtggaggcggccgagcgcgccggggtgcccgccttcctggagacctccgcgccccgcaacctccccttctacgagcggctcggcttcaccgtcaccgccgacgtcgaggtgcccgaaggaccgcgcacctggtgcatgacccgcaagcccggtgcctga

SEQ ID NO: 9327 - DNA, 1770 bp, Artificial Sequence
  Synthetic Polynucleotide
atggccttaccagtgaccgccttgctcctgccgctggccttgctgctccacgccgccaggccggacatccagatgacacagagccctagcagcctgtctgccagcgtgggagacagagtgaccatcacatgcaaggccagcgaccacatcaacaactggctggcctggtatcagcagaagcctggacaggcccctaagctgctgatctacggcgctaccacactggaaacaggcgtgcccagcagattttctggcagcggctctggcaccgactacaccctgacaatatccagcctccagcctgaggacttcgccacctactactgtcagcagagctggaacaccccttggacattcggccagggcaccaagctggaaatcaagagaggcggaggcggaagtggaggcggaggatctggcggcggaggctctcaagttcagcttcaacagcctggcgctgagctggtcaaacctggcgcttctgtgaagatgagctgcaaagccagcggctacgccttcagcagctactggatcaactggatgaagcagaaacccggccagggactcgaatggatcggccaaatctatcccggcgacggcgacaccaactacaacggcaagttcaagggcagagccacactgaccgccgatacctctagcagcacagcctacatgcagctgagcagcctgaccagcgaagatagcgccgtgtacttctgtgcccggtccatcacaacagtcgtgggctgcgctatggactattggggccagggaacaagcgtgaccgtgtctagtacgcgtaaaattgaagttatgtatcctcctccttacctagacaatgagaagagcaatggaaccattatccatgtgaaagggggtaccatcactcaaggtttggcagtgtcaaccatctcatcattctttccacctggctaccaagtgtccttctgcctggtcatggtgctgctgttcgccgtggataccggcctgtacttcagcgtcaagaccaacatccggtccagcaccagagactggaaggaccacaagttcaagtggcggaaggaccctcaggacaagagggccaagcgatctggatctggagcaacaaacttctcactactcaaacaagcaggtgacgtggaggagaatcccgggccttctagaggccatatgaccgagtacaagcccacggtgcgcctcgccacccgcgacgacgtccccagggccgtacgcaccctcgccgccgcgttcgccgactaccccgccacgcgccacaccgtcgatccggaccgccacatcgagcgggtcaccgagctgcaagaactcttcctcacgcgcgtcgggctcgacatcggcaaggtgtgggtcgcggacgacggcgccgcggtggcggtctggaccacgccggagagcgtcgaagcgggggcggtgttcgccgagatcggcccgcgcatggccgagttgagcggttcccggctggccgcgcagcaacagatggaaggcctcctggcgccgcaccggcccaaggagcccgcgtggttcctggccaccgtcggcgtctcgcccgaccaccagggcaagggtctgggcagcgccgtcgtgctccccggagtggaggcggccgagcgcgccggggtgcccgccttcctggagacctccgcgccccgcaacctccccttctacgagcggctcggcttcaccgtcaccgccgacgtcgaggtgcccgaaggaccgcgcacctggtgcatgacccgcaagcccggtgcctga

SEQ ID NO: 9328 - DNA, 1854 bp, Artificial Sequence
  Synthetic Polynucleotide
atggccttaccagtgaccgccttgctcctgccgctggccttgctgctccacgccgccaggccggacatccagatgacacagagccctagcagcctgtctgccagcgtgggagacagagtgaccatcacatgcaaggccagcgaccacatcaacaactggctggcctggtatcagcagaagcctggacaggcccctaagctgctgatctacggcgctaccacactggaaacaggcgtgcccagcagattttctggcagcggctctggcaccgactacaccctgacaatatccagcctccagcctgaggacttcgccacctactactgtcagcagagctggaacaccccttggacattcggccagggcaccaagctggaaatcaagagaggcggaggcggaagtggaggcggaggatctggcggcggaggctctcaagttcagcttcaacagcctggcgctgagctggtcaaacctggcgcttctgtgaagatgagctgcaaagccagcggctacgccttcagcagctactggatcaactggatgaagcagaaacccggccagggactcgaatggatcggccaaatctatcccggcgacggcgacaccaactacaacggcaagttcaagggcagagccacactgaccgccgatacctctagcagcacagcctacatgcagctgagcagcctgaccagcgaagatagcgccgtgtacttctgtgcccggtccatcacaacagtcgtgggctgcgctatggactattggggccagggaacaagcgtgaccgtgtctagtacgcgtaaaattgaagttatgtatcctcctccttacctagacaatgagaagagcaatggaaccattatccatgtgaaagggggtaccggcgacatcgagaacaccagtctggcccctgaggaccctacctttcctgccgatacctggggcacctacctgctgaccacagagacaggactccagaaagatcacgccctgtgggaccacacagcccagaacctgctgagaatgggcctcgcctttctggtgctggttgccctcgtgtggttcctggtggaagattggctgagccggaagcggacaagagagagagccagcagagcctctacctgggagggaagaagaaggctgaacacccagacacttagggccaagcgatctggatctggagcaacaaacttctcactactcaaacaagcaggtgacgtggaggagaatcccgggccttctagaggccatatgaccgagtacaagcccacggtgcgcctcgccacccgcgacgacgtccccagggccgtacgcaccctcgccgccgcgttcgccgactaccccgccacgcgccacaccgtcgatccggaccgccacatcgagcgggtcaccgagctgcaagaactcttcctcacgcgcgtcgggctcgacatcggcaaggtgtgggtcgcggacgacggcgccgcggtggcggtctggaccacgccggagagcgtcgaagcgggggcggtgttcgccgagatcggcccgcgcatggccgagttgagcggttcccggctggccgcgcagcaacagatggaaggcctcctggcgccgcaccggcccaaggagcccgcgtggttcctggccaccgtcggcgtctcgcccgaccaccagggcaagggtctgggcagcgccgtcgtgctccccggagtggaggcggccgagcgcgccggggtgcccgccttcctggagacctccgcgccccgcaacctccccttctacgagcggctcggcttcaccgtcaccgccgacgtcgaggtgcccgaaggaccgcgcacctggtgcatgacccgcaagcccggtgcctga

SEQ ID NO: 9329 - DNA, 2754 bp, Artificial Sequence
  Synthetic Polynucleotide
atggccttaccagtgaccgccttgctcctgccgctggccttgctgctccacgccgccaggccggacatccagatgacacagagccctagcagcctgtctgccagcgtgggagacagagtgaccatcacatgcaaggccagcgaccacatcaacaactggctggcctggtatcagcagaagcctggacaggcccctaagctgctgatctacggcgctaccacactggaaacaggcgtgcccagcagattttctggcagcggctctggcaccgactacaccctgacaatatccagcctccagcctgaggacttcgccacctactactgtcagcagagctggaacaccccttggacattcggccagggcaccaagctggaaatcaagagactcgaggacctgaagaacgtgttcccacctgaggtggccgtgttcgagcctagcgaggccgagatcagccacacccagaaagccaccctcgtgtgcctggctaccggcttctaccccgaccatgtggaactgtcttggtgggtcaacggcaaagaggtgcacagcggcgtgtctaccgacccccagccactgaaagaacagcccgccctgaacgacagccggtactgcctgagcagcagactgagagtgtccgccaccttctggcagaacccccggaaccacttcagatgccaggtgcagttctacggcctgagcgagaacgacgagtggacccaggacagagccaagcccgtgacccagatcgtgtctgccgaagcctggggcagagccgattgcggatccgtggtggaaaaagagcaccctcagctcggagccggaacagtgctgcttctgagagccggcttttacgccgtgtcctttctgtctgtggccgtgggcagcaccgtgtactatcagggcaagtgcctgacctggaagggacctagaaggcaactgcctgctgtggtgcctgctcctttgcctcctccatgtggaagctctgcccatctgctgccacctgttccaggcggaagggccaagcgatctggatctggagcaacaaacttctcactactcaaacaagcaggtgacgtggaggagaatcccgggcctactagtatggactggatttggcgcatccttttccttgtcggcgctgctaccggcgcgcattccttcgaacaagttcagcttcaacagcctggcgctgagctggtcaaacctggcgcttctgtgaagatgagctgcaaagccagcggctacgccttcagcagctactggatcaactggatgaagcagaaacccggccagggactcgaatggatcggccaaatctatcccggcgacggcgacaccaactacaacggcaagttcaagggcagagccacactgaccgccgatacctctagcagcacagcctacatgcagctgagcagcctgaccagcgaagatagcgccgtgtacttctgtgcccggtccatcacaacagtcgtgggctgcgctatggactattggggccagggaacaagcgtgaccgtgtctagtacgcgtatccagaaccctgatcctgccgtgtaccagctgcgggatagcaagagcagcgacaagagcgtgtgtctgttcaccgacttcgacagccagaccaacgtgtcccagagcaaggactccgacgtgtacatcaccgataagaccgtgctggacatgcggagcatggacttcaagagcaactccgccgtggcctggtccaacaagtccgatttcgcctgcgccaacgccttcaacaacagcattatccccgaggacacattcttcccaagccccgagagcagctgcggtaccgtggtcgagaaagaacatccacagcttggcgctggcaccgtcctgttgcttagagccggattctatgccgtcagcttcctgtccgtggctgtggggtctacagtgtattaccagggaaaatgtctcacctggaaaggccccagacgccagcttccagctgttgttcctgctccactgccaccaccttgtggctcctctgctcacttgcttccaccagtgcctggcggacgcgccaagagaagcggatctggcgtgaagcagaccctgaatttcgacctgctgaagctggctggcgacgtggaatccaacccaggcccttctagaggccatatgaccgagtacaagcccacggtgcgcctcgccacccgcgacgacgtccccagggccgtacgcaccctcgccgccgcgttcgccgactaccccgccacgcgccacaccgtcgatccggaccgccacatcgagcgggtcaccgagctgcaagaactcttcctcacgcgcgtcgggctcgacatcggcaaggtgtgggtcgcggacgacggcgccgcggtggcggtctggaccacgccggagagcgtcgaagcgggggcggtgttcgccgagatcggcccgcgcatggccgagttgagcggttcccggctggccgcgcagcaacagatggaaggcctcctggcgccgcaccggcccaaggagcccgcgtggttcctggccaccgtcggcgtctcgcccgaccaccagggcaagggtctgggcagcgccgtcgtgctccccggagtggaggcggccgagcgcgccggggtgcccgccttcctggagacctccgcgccccgcaacctccccttctacgagcggctcggcttcaccgtcaccgccgacgtcgaggtgcccgaaggaccgcgcacctggtgcatgacccgcaagcccggtgcctga

SEQ ID NO: 9330 - DNA, 2712 bp, Artificial Sequence
  Synthetic Polynucleotide
atggccttaccagtgaccgccttgctcctgccgctggccttgctgctccacgccgccaggccggacatccagatgacacagagccctagcagcctgtctgccagcgtgggagacagagtgaccatcacatgcaaggccagcgaccacatcaacaactggctggcctggtatcagcagaagcctggacaggcccctaagctgctgatctacggcgctaccacactggaaacaggcgtgcccagcagattttctggcagcggctctggcaccgactacaccctgacaatatccagcctccagcctgaggacttcgccacctactactgtcagcagagctggaacaccccttggacattcggccagggcaccaagctggaaatcaagagactcgaggacctgaagaacgtgttcccacctgaggtggccgtgttcgagcctagcgaggccgagatcagccacacccagaaagccaccctcgtgtgcctggctaccggcttctaccccgaccatgtggaactgtcttggtgggtcaacggcaaagaggtgcacagcggcgtgtctaccgacccccagccactgaaagaacagcccgccctgaacgacagccggtactgcctgagcagcagactgagagtgtccgccaccttctggcagaacccccggaaccacttcagatgccaggtgcagttctacggcctgagcgagaacgacgagtggacccaggacagagccaagcccgtgacccagatcgtgtctgccgaagcctggggcagagccgattgcggatccgtggtggaaaaagagcaccctcagctcggagccggaacagtgctgcttctgagagccggcttttacgccgtgtcctttctgtctgtggccgtgggcagcaccgtgtactatcagggcaagtgcctgacctggaagggacctagaaggcaactgcctgctgtggtgcctgctcctttgcctcctccatgtggaagctctgcccatctgctgccacctgttccaggcggaagggccaagcgatctggatctggagcaacaaacttctcactactcaaacaagcaggtgacgtggaggagaatcccgggcctactagtatggactggatttggcgcatccttttccttgtcggcgctgctaccggcgcgcattccttcgaacaagttcagcttcaacagcctggcgctgagctggtcaaacctggcgcttctgtgaagatgagctgcaaagccagcggctacgccttcagcagctactggatcaactggatgaagcagaaacccggccagggactcgaatggatcggccaaatctatcccggcgacggcgacaccaactacaacggcaagttcaagggcagagccacactgaccgccgatacctctagcagcacagcctacatgcagctgagcagcctgaccagcgaagatagcgccgtgtacttctgtgcccggtccatcacaacagtcgtgggctgcgctatggactattggggccagggaacaagcgtgaccgtgtctagtacgcgtatccagaaccctgatcctgccgtgtaccagctgcgggatagcaagagcagcgacaagagcgtgtgtctgttcaccgacttcgacagccagaccaacgtgtcccagagcaaggactccgacgtgtacatcaccgataagaccgtgctggacatgcggagcatggacttcaagagcaactccgccgtggcctggtccaacaagtccgatttcgcctgcgccaacgccttcaacaacagcattatccccgaggacacattcttcccaagccccgagagcagctgcggtaccatcactcaaggtttggcagtgtcaaccatctcatcattctttccacctggctaccaagtgtccttctgcctggtcatggtgctgctgttcgccgtggataccggcctgtacttcagcgtcaagaccaacatccggtccagcaccagagactggaaggaccacaagttcaagtggcggaaggaccctcaggacaagagggccaagcgatctggatctggagcaacaaacttctcactactcaaacaagcaggtgacgtggaggagaatcccgggccttctagaggccatatgaccgagtacaagcccacggtgcgcctcgccacccgcgacgacgtccccagggccgtacgcaccctcgccgccgcgttcgccgactaccccgccacgcgccacaccgtcgatccggaccgccacatcgagcgggtcaccgagctgcaagaactcttcctcacgcgcgtcgggctcgacatcggcaaggtgtgggtcgcggacgacggcgccgcggtggcggtctggaccacgccggagagcgtcgaagcgggggcggtgttcgccgagatcggcccgcgcatggccgagttgagcggttcccggctggccgcgcagcaacagatggaaggcctcctggcgccgcaccggcccaaggagcccgcgtggttcctggccaccgtcggcgtctcgcccgaccaccagggcaagggtctgggcagcgccgtcgtgctccccggagtggaggcggccgagcgcgccggggtgcccgccttcctggagacctccgcgccccgcaacctccccttctacgagcggctcggcttcaccgtcaccgccgacgtcgaggtgcccgaaggaccgcgcacctggtgcatgacccgcaagcccggtgcctga

SEQ ID NO: 9331 - DNA, 3315 bp, Artificial Sequence
  Synthetic Polynucleotide
atggccttaccagtgaccgccttgctcctgccgctggccttgctgctccacgccgccaggccggacatccagatgacacagagccctagcagcctgtctgccagcgtgggagacagagtgaccatcacatgcaaggccagcgaccacatcaacaactggctggcctggtatcagcagaagcctggacaggcccctaagctgctgatctacggcgctaccacactggaaacaggcgtgcccagcagattttctggcagcggctctggcaccgactacaccctgacaatatccagcctccagcctgaggacttcgccacctactactgtcagcagagctggaacaccccttggacattcggccagggcaccaagctggaaatcaagagactcgaggacctgaagaacgtgttcccacctgaggtggccgtgttcgagcctagcgaggccgagatcagccacacccagaaagccaccctcgtgtgcctggctaccggcttctaccccgaccatgtggaactgtcttggtgggtcaacggcaaagaggtgcacagcggcgtgtctaccgacccccagccactgaaagaacagcccgccctgaacgacagccggtactgcctgagcagcagactgagagtgtccgccaccttctggcagaacccccggaaccacttcagatgccaggtgcagttctacggcctgagcgagaacgacgagtggacccaggacagagccaagcccgtgacccagatcgtgtctgccgaagcctggggcagagccgattgcggatccgtggtggaaaaagagcaccctcagctcggagccggaacagtgctgcttctgagagccggcttttacgccgtgtcctttctgtctgtggccgtgggcagcaccgtgtactatcagggcaagtgcctgacctggaagggacctagaaggcaactgcctgctgtggtgcctgctcctttgcctcctccatgtggaagctctgcccatctgctgccacctgttccaggcggaagggccaagcgatctggatctggagcaacaaacttctcactactcaaacaagcaggtgacgtggaggagaatcccgggcctactagtatggactggatttggcgcatccttttccttgtcggcgctgctaccggcgcgcattccttcgaacaagttcagcttcaacagcctggcgctgagctggtcaaacctggcgcttctgtgaagatgagctgcaaagccagcggctacgccttcagcagctactggatcaactggatgaagcagaaacccggccagggactcgaatggatcggccaaatctatcccggcgacggcgacaccaactacaacggcaagttcaagggcagagccacactgaccgccgatacctctagcagcacagcctacatgcagctgagcagcctgaccagcgaagatagcgccgtgtacttctgtgcccggtccatcacaacagtcgtgggctgcgctatggactattggggccagggaacaagcgtgaccgtgtctagtacgcgtatccagaaccctgatcctgccgtgtaccagctgcgggatagcaagagcagcgacaagagcgtgtgtctgttcaccgacttcgacagccagaccaacgtgtcccagagcaaggactccgacgtgtacatcaccgataagaccgtgctggacatgcggagcatggacttcaagagcaactccgccgtggcctggtccaacaagtccgatttcgcctgcgccaacgccttcaacaacagcattatccccgaggacacattcttcccaagccccgagagcagctgcggtacccagagttttgggttgttggaccctaaattgagctatctgttggacggaatcctgttcatttacggagtgatcctgaccgcattgttcctgtggcgacgcaagcgcaaagaaaagcaaagcgagacaagcccaaaagaatttctcactatatacgaggacgtgaaagatttgaagacgaggcggaatcatgagcaagagcagacatttcctggcgggggctctactatctactcaatgattcaatcccaaagctccgctccgacttcccaagagcccgcttacactctctactcactgatacagccttcaagaaaatcaggctctcggaaacggaatcattccccatccttcaatagtaccatctatgaagtaatcggtaagagtcaacctaaagctcaaaaccccgctcgcttgagccgcaaggagctggaaaacttcgatgtatatagctctagacgggttaagttttccagatccgcagacgcacccgcttaccaacaagggcagaaccaactctacaatgaacttaatttggggcggagggaagagtacgacgttctggacaaaaggaggggacgagatcccgagatgggcggaaagcctcagcgaaggaagaatccgcaagaggggctttataacgaactccagaaagataaaatggcagaagcctatagtgagattgggatgaagggagaaaggaggaggggtaaaggtcacgatgggttgtaccaaggattgagcacagccactaaagatacctatgatgcgctccacatgcaggccctgccgccaagacgcgccaagagaagcggatctggcgtgaagcagaccctgaatttcgacctgctgaagctggctggcgacgtggaatccaacccaggccctggccatatgaccgagtacaagcccacggtgcgcctcgccacccgcgacgacgtccccagggccgtacgcaccctcgccgccgcgttcgccgactaccccgccacgcgccacaccgtcgatccggaccgccacatcgagcgggtcaccgagctgcaagaactcttcctcacgcgcgtcgggctcgacatcggcaaggtgtgggtcgcggacgacggcgccgcggtggcggtctggaccacgccggagagcgtcgaagcgggggcggtgttcgccgagatcggcccgcgcatggccgagttgagcggttcccggctggccgcgcagcaacagatggaaggcctcctggcgccgcaccggcccaaggagcccgcgtggttcctggccaccgtcggcgtctcgcccgaccaccagggcaagggtctgggcagcgccgtcgtgctccccggagtggaggcggccgagcgcgccggggtgcccgccttcctggagacctccgcgccccgcaacctccccttctacgagcggctcggcttcaccgtcaccgccgacgtcgaggtgcccgaaggaccgcgcacctggtgcatgacccgcaagcccggtgcctga

SEQ ID NO: 9332 - DNA, 3270 bp, Artificial Sequence
  Synthetic Polynucleotide
atggccttaccagtgaccgccttgctcctgccgctggccttgctgctccacgccgccaggccggacatccagatgacacagagccctagcagcctgtctgccagcgtgggagacagagtgaccatcacatgcaaggccagcgaccacatcaacaactggctggcctggtatcagcagaagcctggacaggcccctaagctgctgatctacggcgctaccacactggaaacaggcgtgcccagcagattttctggcagcggctctggcaccgactacaccctgacaatatccagcctccagcctgaggacttcgccacctactactgtcagcagagctggaacaccccttggacattcggccagggcaccaagctggaaatcaagagactcgagggacagcctaaggccaatcctaccgtgacactgttccctccaagcagcgaagaactccaggccaacaaggccacacttgtgtgcctgatctccgacttctaccctggggctgtgacagtggcttggaaggccgatggatctcctgtgaaagccggcgtggaaaccaccaagccatccaagcagagcaacaacaaatacgccgccagctcctacctgagcctgacacctgagcagtggaagtcccacagatcctacagctgccaagtgacccacgaaggcagcaccgtggaaaagacagtggcccctacagagtgcagcggatcccagagcttcggcctgctggaccccaagctgagctacctgctggatggcatcctgttcatctacggcgtgatcctgaccgccctgttcctgtggcggcggaagcggaaagagaagcagtctgagacaagccccaaagagttcctgaccatctacgaggacgtgaaggacctgaaaacccggcggaaccacgaacaagagcagacctttcctggcggaggcagcaccatctacagcatgatccagagccagagcagcgcccctacaagccaagagcctgcctacacactgtactccctgatccagcctagcagaaagagcggcagccggaagagaaatcacagccccagcttcaacagcacgatctacgaagtgatcggcaagagccagccaaaggctcagaaccctgccagactgagccggaaagagctggaaaacttcgacgtgtacagcactagtagagtgaagttcagcagaagcgccgacgcccctgcctaccagcagggacagaaccaactgtacaacgagctgaacctgggcagacgggaagagtacgacgtgctggacaagcggagaggcagggaccctgagatgggcggaaagccccagcggagaaagaacccccaggaaggactgtataacgaactccagaaagacaagatggccgaagcctacagcgagatcggcatgaagggcgagcggagaagaggcaagggccacgatggcctgtaccagggcctgagcaccgccaccaaggacacctatgacgccctgcacatgcaggccctgcctccaagaagggccaagcgatctggatctggagcaacaaacttctcactactcaaacaagcaggtgacgtggaggagaatcccgggcctatggactggatttggcgcatccttttccttgtcggcgctgctaccggcgcgcattccttcgaacaagttcagcttcaacagcctggcgctgagctggtcaaacctggcgcttctgtgaagatgagctgcaaagccagcggctacgccttcagcagctactggatcaactggatgaagcagaaacccggccagggactcgaatggatcggccaaatctatcccggcgacggcgacaccaactacaacggcaagttcaagggcagagccacactgaccgccgatacctctagcagcacagcctacatgcagctgagcagcctgaccagcgaagatagcgccgtgtacttctgtgcccggtccatcacaacagtcgtgggctgcgctatggactattggggccagggaacaagcgtgaccgtgtctagtacgcgtgcctctacaaagggaccctccgtgtttcctctggctcccagcagcaagtctacaagcggaggaacagccgctctgggctgcctggtcaaggattactttcccgagcctgtgaccgtgtcctggaatagcggagcactgacaagcggcgtgcacacctttccagccgtgctgcaaagcagcggcctgtactctctgagcagcgtggtcacagtgcctagctctagcctgggcacccagacctacatctgcaatgtgaaccacaagcctagcaacaccaaggtggacaagagagtggaacccaagagctgtggtaccgtggtcgagaaagaacatccacagcttggcgctggcaccgtcctgttgcttagagccggattctatgccgtcagcttcctgtccgtggctgtggggtctacagtgtattaccagggaaaatgtctcacctggaaaggccccagacgccagcttccagctgttgttcctgctccactgccaccaccttgtggctcctctgctcacttgcttccaccagtgcctggcggacgcgccaagagaagcggatctggcgtgaagcagaccctgaatttcgacctgctgaagctggctggcgacgtggaatccaacccaggcccttctagaggccatatgaccgagtacaagcccacggtgcgcctcgccacccgcgacgacgtccccagggccgtacgcaccctcgccgccgcgttcgccgactaccccgccacgcgccacaccgtcgatccggaccgccacatcgagcgggtcaccgagctgcaagaactcttcctcacgcgcgtcgggctcgacatcggcaaggtgtgggtcgcggacgacggcgccgcggtggcggtctggaccacgccggagagcgtcgaagcgggggcggtgttcgccgagatcggcccgcgcatggccgagttgagcggttcccggctggccgcgcagcaacagatggaaggcctcctggcgccgcaccggcccaaggagcccgcgtggttcctggccaccgtcggcgtctcgcccgaccaccagggcaagggtctgggcagcgccgtcgtgctccccggagtggaggcggccgagcgcgccggggtgcccgccttcctggagacctccgcgccccgcaacctccccttctacgagcggctcggcttcaccgtcaccgccgacgtcgaggtgcccgaaggaccgcgcacctggtgcatgacccgcaagcccggtgcctga

SEQ ID NO: 9333 - DNA, 2643 bp, Artificial Sequence
  Synthetic Polynucleotide
atggccttaccagtgaccgccttgctcctgccgctggccttgctgctccacgccgccaggccggacatccagatgacacagagccctagcagcctgtctgccagcgtgggagacagagtgaccatcacatgcaaggccagcgaccacatcaacaactggctggcctggtatcagcagaagcctggacaggcccctaagctgctgatctacggcgctaccacactggaaacaggcgtgcccagcagattttctggcagcggctctggcaccgactacaccctgacaatatccagcctccagcctgaggacttcgccacctactactgtcagcagagctggaacaccccttggacattcggccagggcaccaagctggaaatcaagagactcgagggacagcctaaggccaatcctaccgtgacactgttccctccaagcagcgaagaactccaggccaacaaggccacacttgtgtgcctgatctccgacttctaccctggggctgtgacagtggcttggaaggccgatggatctcctgtgaaagccggcgtggaaaccaccaagccatccaagcagagcaacaacaaatacgccgccagctcctacctgagcctgacacctgagcagtggaagtcccacagatcctacagctgccaagtgacccacgaaggcagcaccgtggaaaagacagtggcccctacagagtgcagcggatccattacccaaggactggctgtgcctacaatctctagcttctttccgcctggataccaagtctccttctgtcttgtgatggtcctcctgtttgctgtggacacaggactgtacttttccgtgaaaacgaacatccgcagctccacacgcgattggaaagatcacaagtttaaatggcgcaaagatccccaggacaagcgcgccaagagaagcggatctggcgtgaagcagaccctgaatttcgacctgctgaagctggctggcgacgtggaatccaacccaggccctactagtatggactggatttggcgcatccttttccttgtcggcgctgctaccggcgcgcattccttcgaacaagttcagcttcaacagcctggcgctgagctggtcaaacctggcgcttctgtgaagatgagctgcaaagccagcggctacgccttcagcagctactggatcaactggatgaagcagaaacccggccagggactcgaatggatcggccaaatctatcccggcgacggcgacaccaactacaacggcaagttcaagggcagagccacactgaccgccgatacctctagcagcacagcctacatgcagctgagcagcctgaccagcgaagatagcgccgtgtacttctgtgcccggtccatcacaacagtcgtgggctgcgctatggactattggggccagggaacaagcgtgaccgtgtctagtacgcgtgcctctacaaagggaccctccgtgtttcctctggctcccagcagcaagtctacaagcggaggaacagccgctctgggctgcctggtcaaggattactttcccgagcctgtgaccgtgtcctggaatagcggagcactgacaagcggcgtgcacacctttccagccgtgctgcaaagcagcggcctgtactctctgagcagcgtggtcacagtgcctagctctagcctgggcacccagacctacatctgcaatgtgaaccacaagcctagcaacaccaaggtggacaagagagtggaacccaagagctgtggtaccatcactcaaggtttggcagtgtcaaccatctcatcattctttccacctggctaccaagtgtccttctgcctggtcatggtgctgctgttcgccgtggataccggcctgtacttcagcgtcaagaccaacatccggtccagcaccagagactggaaggaccacaagttcaagtggcggaaggaccctcaggacaagagggccaagcgatctggatctggagcaacaaacttctcactactcaaacaagcaggtgacgtggaggagaatcccgggccttctagaggccatatgaccgagtacaagcccacggtgcgcctcgccacccgcgacgacgtccccagggccgtacgcaccctcgccgccgcgttcgccgactaccccgccacgcgccacaccgtcgatccggaccgccacatcgagcgggtcaccgagctgcaagaactcttcctcacgcgcgtcgggctcgacatcggcaaggtgtgggtcgcggacgacggcgccgcggtggcggtctggaccacgccggagagcgtcgaagcgggggcggtgttcgccgagatcggcccgcgcatggccgagttgagcggttcccggctggccgcgcagcaacagatggaaggcctcctggcgccgcaccggcccaaggagcccgcgtggttcctggccaccgtcggcgtctcgcccgaccaccagggcaagggtctgggcagcgccgtcgtgctccccggagtggaggcggccgagcgcgccggggtgcccgccttcctggagacctccgcgccccgcaacctccccttctacgagcggctcggcttcaccgtcaccgccgacgtcgaggtgcccgaaggaccgcgcacctggtgcatgacccgcaagcccggtgcctga

SEQ ID NO: 9334 - DNA, 2451 bp, Artificial Sequence
  Synthetic Polynucleotide
atggccttaccagtgaccgccttgctcctgccgctggccttgctgctccacgccgccaggccggacatccagatgacacagagccctagcagcctgtctgccagcgtgggagacagagtgaccatcacatgcaaggccagcgaccacatcaacaactggctggcctggtatcagcagaagcctggacaggcccctaagctgctgatctacggcgctaccacactggaaacaggcgtgcccagcagattttctggcagcggctctggcaccgactacaccctgacaatatccagcctccagcctgaggacttcgccacctactactgtcagcagagctggaacaccccttggacattcggccagggcaccaagctggaaatcaagagaggcggaggcggaagtggaggcggaggatctggcggcggaggctctcaagttcagcttcaacagcctggcgctgagctggtcaaacctggcgcttctgtgaagatgagctgcaaagccagcggctacgccttcagcagctactggatcaactggatgaagcagaaacccggccagggactcgaatggatcggccaaatctatcccggcgacggcgacaccaactacaacggcaagttcaagggcagagccacactgaccgccgatacctctagcagcacagcctacatgcagctgagcagcctgaccagcgaagatagcgccgtgtacttctgtgcccggtccatcacaacagtcgtgggctgcgctatggactattggggccagggaacaagcgtgaccgtgtctagtacgcgtaaaattgaagttatgtatcctcctccttacctagacaatgagaagagcaatggaaccattatccatgtgaaaggggcgcgtaagtctgtgcgcttttacctggtcgtcagccctgccagtgcctccactcagacatcttggaccccaagggaccttgtgtcctctcagacacagacacagtcctgcgtgccaccaactgctggcgcaagacaggctccagagtctcccagcacaatccccgtcccttctcagccccagaactccacacttaggccaggaccagctgctccaatcgcactggtcccagtgttctgcggactgctggttgccaagtctctggtgctgagcgcactcctcgtttggtggggcgatatttggtggaaaacgatgatggaattgagatccctcgatacgcagaaagccacatgccaccttcagcaagtcacagacttgccttggaccagcgtcagctctcccgtggaacgggaaattctgtatcatacagtggcccgcaccaagatttccgacgatgacgacgagcacacactgcgcgccaagagaagcggatctggcgtgaagcagaccctgaatttcgacctgctgaagctggctggcgacgtggaatccaacccaggcccttctagaatgtaccggatgcagctgctgagctgtatcgccctgtctctggccctggtcacaaatagcgcccctaccagcagcagcaccaagaaaacccagctgcaactggaacacctcctgctggacctccagatgatcctgaacggcatcaacaactacaagaaccccaagctgacccggatgctgaccttcaagttctacatgcccaagaaggccaccgagctgaagcacctccagtgcctggaagaggaactgaagcccctggaagaagtgctgaatctggcccagagcaagaacttccacctgaggccaagggacctgatctccaacatcaacgtgatcgtgctggaactgaaaggcagcgagacaaccttcatgtgcgagtacgccgacgagacagctaccatcgtggaatttctgaatcggtggatcaccttctgccagagcatcatcagcaccctgacacatatggcctgccatcagctgtgtgccagaggacactgttggggacctggacctacacagtgcgtgaactgctcccagttcctgagaggccaagagtgcgtggaagagtgcagagtgctgcaaggactgccccgcgagtatgtgaacgccagacactgtctgccttgtcaccctgagtgccagcctcagaatggcagcgtgacctgttttggccctgaggccgatcagtgtgtggcctgcgctcactataaggaccctccattctgcgtggcccggtgtccttctggcgtgaagcctgatctgagctacatgcccatctggaagttccccgacgaggaaggcgcttgccagccttgtcctatcaactgcacccacagctgcgtggacctggatgataagggatgtcccgccgagcagagagcctctcctctgacctctatcatctctgccgtcgtgggcatcctgctggtggtggttctgggcgttgtgttcggcatcctgattaagcggcggcagcagaagatccgcaagtacaccatgagataa

SEQ ID NO: 9335 - DNA, 3831 bp, Artificial Sequence
  Synthetic Polynucleotide
atggccttaccagtgaccgccttgctcctgccgctggccttgctgctccacgccgccaggccggacatccagatgacacagagccctagcagcctgtctgccagcgtgggagacagagtgaccatcacatgcaaggccagcgaccacatcaacaactggctggcctggtatcagcagaagcctggacaggcccctaagctgctgatctacggcgctaccacactggaaacaggcgtgcccagcagattttctggcagcggctctggcaccgactacaccctgacaatatccagcctccagcctgaggacttcgccacctactactgtcagcagagctggaacaccccttggacattcggccagggcaccaagctggaaatcaagagactcgagggacagcctaaggccaatcctaccgtgacactgttccctccaagcagcgaagaactccaggccaacaaggccacacttgtgtgcctgatctccgacttctaccctggggctgtgacagtggcttggaaggccgatggatctcctgtgaaagccggcgtggaaaccaccaagccatccaagcagagcaacaacaaatacgccgccagctcctacctgagcctgacacctgagcagtggaagtcccacagatcctacagctgccaagtgacccacgaaggcagcaccgtggaaaagacagtggcccctacagagtgcagcggatcccagagcttcggcctgctggaccccaagctgagctacctgctggatggcatcctgttcatctacggcgtgatcctgaccgccctgttcctgtggcggcggaagcggaaagagaagcagtctgagacaagccccaaagagttcctgaccatctacgaggacgtgaaggacctgaaaacccggcggaaccacgaacaagagcagacctttcctggcggaggcagcaccatctacagcatgatccagagccagagcagcgcccctacaagccaagagcctgcctacacactgtactccctgatccagcctagcagaaagagcggcagccggaagagaaatcacagccccagcttcaacagcacgatctacgaagtgatcggcaagagccagccaaaggctcagaaccctgccagactgagccggaaagagctggaaaacttcgacgtgtacagcactagtagagtgaagttcagcagaagcgccgacgcccctgcctaccagcagggacagaaccaactgtacaacgagctgaacctgggcagacgggaagagtacgacgtgctggacaagcggagaggcagggaccctgagatgggcggaaagccccagcggagaaagaacccccaggaaggactgtataacgaactccagaaagacaagatggccgaagcctacagcgagatcggcatgaagggcgagcggagaagaggcaagggccacgatggcctgtaccagggcctgagcaccgccaccaaggacacctatgacgccctgcacatgcaggccctgcctccaagaagggccaagcgatctggatctggagcaacaaacttctcactactcaaacaagcaggtgacgtggaggagaatcccgggcctatggactggatttggcgcatccttttccttgtcggcgctgctaccggcgcgcattccttcgaacaagttcagcttcaacagcctggcgctgagctggtcaaacctggcgcttctgtgaagatgagctgcaaagccagcggctacgccttcagcagctactggatcaactggatgaagcagaaacccggccagggactcgaatggatcggccaaatctatcccggcgacggcgacaccaactacaacggcaagttcaagggcagagccacactgaccgccgatacctctagcagcacagcctacatgcagctgagcagcctgaccagcgaagatagcgccgtgtacttctgtgcccggtccatcacaacagtcgtgggctgcgctatggactattggggccagggaacaagcgtgaccgtgtctagtacgcgtgcctctacaaagggaccctccgtgtttcctctggctcccagcagcaagtctacaagcggaggaacagccgctctgggctgcctggtcaaggattactttcccgagcctgtgaccgtgtcctggaatagcggagcactgacaagcggcgtgcacacctttccagccgtgctgcaaagcagcggcctgtactctctgagcagcgtggtcacagtgcctagctctagcctgggcacccagacctacatctgcaatgtgaaccacaagcctagcaacaccaaggtggacaagagagtggaacccaagagctgtggtacccagagttttgggttgttggaccctaaattgagctatctgttggacggaatcctgttcatttacggagtgatcctgaccgcattgttcctgtggcgacgcaagcgcaaagaaaagcaaagcgagacaagcccaaaagaatttctcactatatacgaggacgtgaaagatttgaagacgaggcggaatcatgagcaagagcagacatttcctggcgggggctctactatctactcaatgattcaatcccaaagctccgctccgacttcccaagagcccgcttacactctctactcactgatacagccttcaagaaaatcaggctctcggaaacggaatcattccccatccttcaatagtaccatctatgaagtaatcggtaagagtcaacctaaagctcaaaaccccgctcgcttgagccgcaaggagctggaaaacttcgatgtatatagctctagacgggttaagttttccagatccgcagacgcacccgcttaccaacaagggcagaaccaactctacaatgaacttaatttggggcggagggaagagtacgacgttctggacaaaaggaggggacgagatcccgagatgggcggaaagcctcagcgaaggaagaatccgcaagaggggctttataacgaactccagaaagataaaatggcagaagcctatagtgagattgggatgaagggagaaaggaggaggggtaaaggtcacgatgggttgtaccaaggattgagcacagccactaaagatacctatgatgcgctccacatgcaggccctgccgccaagacgcgccaagagaagcggatctggcgtgaagcagaccctgaatttcgacctgctgaagctggctggcgacgtggaatccaacccaggccctggccatatgaccgagtacaagcccacggtgcgcctcgccacccgcgacgacgtccccagggccgtacgcaccctcgccgccgcgttcgccgactaccccgccacgcgccacaccgtcgatccggaccgccacatcgagcgggtcaccgagctgcaagaactcttcctcacgcgcgtcgggctcgacatcggcaaggtgtgggtcgcggacgacggcgccgcggtggcggtctggaccacgccggagagcgtcgaagcgggggcggtgttcgccgagatcggcccgcgcatggccgagttgagcggttcccggctggccgcgcagcaacagatggaaggcctcctggcgccgcaccggcccaaggagcccgcgtggttcctggccaccgtcggcgtctcgcccgaccaccagggcaagggtctgggcagcgccgtcgtgctccccggagtggaggcggccgagcgcgccggggtgcccgccttcctggagacctccgcgccccgcaacctccccttctacgagcggctcggcttcaccgtcaccgccgacgtcgaggtgcccgaaggaccgcgcacctggtgcatgacccgcaagcccggtgcctga

SEQ ID NO: 9336 - DNA, 2667 bp, Artificial Sequence
  Synthetic Polynucleotide
atggccttaccagtgaccgccttgctcctgccgctggccttgctgctccacgccgccaggccggacatccagatgacacagagccctagcagcctgtctgccagcgtgggagacagagtgaccatcacatgcaaggccagcgaccacatcaacaactggctggcctggtatcagcagaagcctggacaggcccctaagctgctgatctacggcgctaccacactggaaacaggcgtgcccagcagattttctggcagcggctctggcaccgactacaccctgacaatatccagcctccagcctgaggacttcgccacctactactgtcagcagagctggaacaccccttggacattcggccagggcaccaagctggaaatcaagagactcgagggacagcctaaggccaatcctaccgtgacactgttccctccaagcagcgaagaactccaggccaacaaggccacacttgtgtgcctgatctccgacttctaccctggggctgtgacagtggcttggaaggccgatggatctcctgtgaaagccggcgtggaaaccaccaagccatccaagcagagcaacaacaaatacgccgccagctcctacctgagcctgacacctgagcagtggaagtcccacagatcctacagctgccaagtgacccacgaaggcagcaccgtggaaaagacagtggcccctacagagtgcagcggatccgtggtggaaaaagagcaccctcagctcggagccggaacagtgctgcttctgagagccggcttttacgccgtgtcctttctgtctgtggccgtgggcagcaccgtgtactatcagggcaagtgcctgacctggaagggacctagaaggcaactgcctgctgtggtgcctgctcctttgcctcctccatgtggaagctctgcccatctgctgccacctgttccaggcggaagggccaagcgatctggatctggagcaacaaacttctcactactcaaacaagcaggtgacgtggaggagaatcccgggcctactagtatggactggatttggcgcatccttttccttgtcggcgctgctaccggcgcgcattccttcgaacaagttcagcttcaacagcctggcgctgagctggtcaaacctggcgcttctgtgaagatgagctgcaaagccagcggctacgccttcagcagctactggatcaactggatgaagcagaaacccggccagggactcgaatggatcggccaaatctatcccggcgacggcgacaccaactacaacggcaagttcaagggcagagccacactgaccgccgatacctctagcagcacagcctacatgcagctgagcagcctgaccagcgaagatagcgccgtgtacttctgtgcccggtccatcacaacagtcgtgggctgcgctatggactattggggccagggaacaagcgtgaccgtgtctagtacgcgtgcctctacaaagggaccctccgtgtttcctctggctcccagcagcaagtctacaagcggaggaacagccgctctgggctgcctggtcaaggattactttcccgagcctgtgaccgtgtcctggaatagcggagcactgacaagcggcgtgcacacctttccagccgtgctgcaaagcagcggcctgtactctctgagcagcgtggtcacagtgcctagctctagcctgggcacccagacctacatctgcaatgtgaaccacaagcctagcaacaccaaggtggacaagagagtggaacccaagagctgtggtaccatcactcaaggtttggcagtgtcaaccatctcatcattctttccacctggctaccaagtgtccttctgcctggtcatggtgctgctgttcgccgtggataccggcctgtacttcagcgtcaagaccaacatccggtccagcaccagagactggaaggaccacaagttcaagtggcggaaggaccctcaggacaagagggccaagcgatctggatctggagcaacaaacttctcactactcaaacaagcaggtgacgtggaggagaatcccgggccttctagaggccatatgaccgagtacaagcccacggtgcgcctcgccacccgcgacgacgtccccagggccgtacgcaccctcgccgccgcgttcgccgactaccccgccacgcgccacaccgtcgatccggaccgccacatcgagcgggtcaccgagctgcaagaactcttcctcacgcgcgtcgggctcgacatcggcaaggtgtgggtcgcggacgacggcgccgcggtggcggtctggaccacgccggagagcgtcgaagcgggggcggtgttcgccgagatcggcccgcgcatggccgagttgagcggttcccggctggccgcgcagcaacagatggaaggcctcctggcgccgcaccggcccaaggagcccgcgtggttcctggccaccgtcggcgtctcgcccgaccaccagggcaagggtctgggcagcgccgtcgtgctccccggagtggaggcggccgagcgcgccggggtgcccgccttcctggagacctccgcgccccgcaacctccccttctacgagcggctcggcttcaccgtcaccgccgacgtcgaggtgcccgaaggaccgcgcacctggtgcatgacccgcaagcccggtgcctga

SEQ ID NO: 9337 - DNA, 1869 bp, Artificial Sequence
  Synthetic Polynucleotide
atggccttaccagtgaccgccttgctcctgccgctggccttgctgctccacgccgccaggccgcagatcgtgctgtctcagtctcctgccatcctgagcgcttccccaggcgagaaagtgaccatgacctgtagagccagcagcagcgtgtcctacatgcactggtatcagcagaagcccggcagcagccctaagccttggatctacgccaccagcaatctggcctctggcgtgccagccagattttctggctctggcagcggcaccagctacagcttcacaatcagcagagtggaagccgaggacgccgccacctactattgtcagcagtggaccttcaatcctcctaccttcggcggaggcacccggctggaaatcaaaagaacagtggctgctggcggaggcggaagtggaggcggaggatctggcggcggaggctctcaggcttatctgcaacagagcggagccgaactcgtcagacctggcgcttctgtgaagatgagctgcaaggccagcggctacaccttcaccagctataatatgcactgggtcaagcagacccctcggcagggactcgaatggatcggcggaatctatcccggcaacggcgacacctcctacaaccagaagttcaagggcaaagccacactgaccgtgggcaagagcagcagcaccgcctatatgcagctcagcagcctgaccagcgaggacagcgccgtgtacttctgcgccagatacgactacaactacgctatggactactggggccagggcaccagcgtgacagttagctctgccagcacgcgtggaggactcgagaaaattgaagttatgtatcctcctccttacctagacaatgagaagagcaatggaaccattatccatgtgaaaggatccgtcgagaaagaacatccacagcttggcgctggcaccgtcctgttgcttagagccggattctatgccgtcagcttcctgtccgtggctgtgtggtggggcgatatttggtggaaaacgatgatggaattgagatccctcgatacgcagaaagccacatgccaccttcagcaagtcacagacttgccttggaccagcgtcagctctcccgtggaacgggaaattctgtatcatacagtggcccgcaccaagatttccgacgatgacgacgagcacacactgagggccaagcgatctggatctggagcaacaaacttctcactactcaaacaagcaggtgacgtggaggagaatcccgggcctactagaggccatatgaccgagtacaagcccacggtgcgcctcgccacccgcgacgacgtccccagggccgtacgcaccctcgccgccgcgttcgccgactaccccgccacgcgccacaccgtcgatccggaccgccacatcgagcgggtcaccgagctgcaagaactcttcctcacgcgcgtcgggctcgacatcggcaaggtgtgggtcgcggacgacggcgccgcggtggcggtctggaccacgccggagagcgtcgaagcgggggcggtgttcgccgagatcggcccgcgcatggccgagttgagcggttcccggctggccgcgcagcaacagatggaaggcctcctggcgccgcaccggcccaaggagcccgcgtggttcctggccaccgtcggcgtctcgcccgaccaccagggcaagggtctgggcagcgccgtcgtgctccccggagtggaggcggccgagcgcgccggggtgcccgccttcctggagacctccgcgccccgcaacctccccttctacgagcggctcggcttcaccgtcaccgccgacgtcgaggtgcccgaaggaccgcgcacctggtgcatgacccgcaagcccggtgcctga

SEQ ID NO: 9338 - DNA, 1848 bp, Artificial Sequence
  Synthetic Polynucleotide
atggccttaccagtgaccgccttgctcctgccgctggccttgctgctccacgccgccaggccggacgagatcgtgctgacacagagccccgccaccctgtcactgtctccaggcgaaagagccaccctgagctgtagcgccagcagcagcgtgtcctacatgcactggtatcagcagaagcccggccaggcccccagactgctgatctacgataccagcaagctggcctccggcatccccgccagattttctggcagcggctccggcaccgacttcaccctgacaatcagcagcctggaacccgaggacgtggccgtgtactactgttttcaaggcagcgtgtaccccttcaccttcggccagggcaccaagctggaaatcaagagaggtggcggtggctcgggcggtggtgggtcgggtggcggcggatctcaggtgcagctccaggaatctggccctggcctcgtgaagcctagccagaccctgagcctgacctgtaccgtgtctggcggcagcatcagcacaagcggcatgggcgtgggctggatcagacagcaccctggcaagggcctggaatggatcggccacatttggtgggacgacgacaagcggtacaaccccgccctgaagtccagagtgaccatcagcgtggacaccagcaagaaccagttcagcctgaagctgagcagcgtgacagccgccgataccgccgtgtattattgcgcccggatggaactgtggtcctactacttcgactactggggccagggaaccctcgtgaccgtgtctagtctcgagaaaattgaagttatgtatcctcctccttacctagacaatgagaagagcaatggaaccattatccatgtgaaaggatccgtcgagaaagaacatccacagcttggcgctggcaccgtcctgttgcttagagccggattctatgccgtcagcttcctgtccgtggctgtgtggtggggcgatatttggtggaaaacgatgatggaattgagatccctcgatacgcagaaagccacatgccaccttcagcaagtcacagacttgccttggaccagcgtcagctctcccgtggaacgggaaattctgtatcatacagtggcccgcaccaagatttccgacgatgacgacgagcacacactgagggccaagcgatctggatctggagcaacaaacttctcactactcaaacaagcaggtgacgtggaggagaatcccgggcctactagaggccatatgaccgagtacaagcccacggtgcgcctcgccacccgcgacgacgtccccagggccgtacgcaccctcgccgccgcgttcgccgactaccccgccacgcgccacaccgtcgatccggaccgccacatcgagcgggtcaccgagctgcaagaactcttcctcacgcgcgtcgggctcgacatcggcaaggtgtgggtcgcggacgacggcgccgcggtggcggtctggaccacgccggagagcgtcgaagcgggggcggtgttcgccgagatcggcccgcgcatggccgagttgagcggttcccggctggccgcgcagcaacagatggaaggcctcctggcgccgcaccggcccaaggagcccgcgtggttcctggccaccgtcggcgtctcgcccgaccaccagggcaagggtctgggcagcgccgtcgtgctccccggagtggaggcggccgagcgcgccggggtgcccgccttcctggagacctccgcgccccgcaacctccccttctacgagcggctcggcttcaccgtcaccgccgacgtcgaggtgcccgaaggaccgcgcacctggtgcatgacccgcaagcccggtgcctga

SEQ ID NO: 9339 - DNA, 1581 bp, Artificial Sequence
  Synthetic Polynucleotide
atggccttaccagtgaccgccttgctcctgccgctggccttgctgctccacgccgccaggccggacatccagatgacacagagccctagcagcctgtctgccagcgtgggagacagagtgaccatcacatgcaaggccagcgaccacatcaacaactggctggcctggtatcagcagaagcctggacaggcccctaagctgctgatctacggcgctaccacactggaaacaggcgtgcccagcagattttctggcagcggctctggcaccgactacaccctgacaatatccagcctccagcctgaggacttcgccacctactactgtcagcagagctggaacaccccttggacattcggccagggcaccaagctggaaatcaagagaggcggaggcggaagtggaggcggaggatctggcggcggaggctctcaagttcagcttcaacagcctggcgctgagctggtcaaacctggcgcttctgtgaagatgagctgcaaagccagcggctacgccttcagcagctactggatcaactggatgaagcagaaacccggccagggactcgaatggatcggccaaatctatcccggcgacggcgacaccaactacaacggcaagttcaagggcagagccacactgaccgccgatacctctagcagcacagcctacatgcagctgagcagcctgaccagcgaagatagcgccgtgtacttctgtgcccggtccatcacaacagtcgtgggctgcgctatggactattggggccagggaacaagcgtgaccgtgtctagtacgcgtaaaattgaagttatgtatcctcctccttacctagacaatgagaagagcaatggaaccattatccatgtgaaagggggtacccttcccaaagctgtcgtctttctcgaaccccaatggtatcgggtgctcgaaaaagactctgtgacactgaaatgccaaggggcctactctcccgaggacaactccacacagtggtttcataatgagtccctcatcagctctcaggccagctcttatttcattgatgccgctacagtggacgactccggcgagtatcggtgtcagaccaatctgtctacactgtctgaccccgtgcagcttgaggtccacattggatggttgctcttgcaagccccacgctgggttttcaaagaggaagatccaatccatctgcggtgccacagctggaaaaacaccgctctccacaaagtcacatacctgcaaaatggcaaaggacgcaaatacttccatcacaattccgatttttacattccgaaggctaccctgaaagacagcggcagctatttctgccggggactcgtcggctccaagaatgtgtcctccgaaaccgtgaatatcacgattacccaaggactggctgtgcctacaatctctagcttctttccgcctggataccaagtctccttctgtcttgtgatggtcctcctgtttgctgtggacacaggactgtacttttccgtgaaaacgaacatccgcagctccacacgcgattggaaagatcacaagtttaaatggcgcaaagatccccaggacaagtaa

SEQ ID NO: 9340 - DNA, 2637 bp, Artificial Sequence
  Synthetic Polynucleotide
atggccttaccagtgaccgccttgctcctgccgctggccttgctgctccacgccgccaggccggcatgcgaagtgcagctgcttgaaagtggcggcggactgattcagcctggcggatctctgagactgagctgtgccgccagcggcttcaccttttctagccacgccatgacctgggtccgacaggcacctggaaaagggcttgaatgggtgtccgccatcagcggctctggcgattacacacactacgccgacagcgtgaagggcagattcaccatcagcagagacaacagcaagaacaccgtgtacctccagatgaacagcctgagagccgaggacagcgccgtgtattattgcgccaaggatgaggatggcggcagcctgcttggacacagaggacaaggcaccctggtcaccgtttcttccggtaccggcggaggcggatctggcggcggaggtagcggtggcggaggatctgaattcgacatccagatgacacagagccctagcagcctgtctgccagcgtgggagacagagtgaccatcacctgtagagccagccaggacgtgaacacagccgtggcttggtatcagcagaagcctggcaaggcccctaagctgctgatctacagcgccagctttctgtacagcggcgtgcccagcagattcagcggaagcagaagcggcaccgacttcaccctgacaatatccagcctccagcctgaggacttcgccacctactactgccagcaggcttacaccacacctccaacattcggccagggcaccaaggtggaaatcaagagaacaggcggaggcggaagtggaggcggaggatctggcggcggaggctctgaagtgcagctggttgaatcaggtggcggcctggttcaacctggcggatctctgagactgagctgtgccgccagcggcttcaacatcaaggacacctacatccactgggtccgacaggcccctggcaaaggacttgaatgggtcgccagaatctaccccaccaacggctacaccagatacgccgactctgtgaagggcagattcaccatcagcgccgacaccagcaagaacaccgcctacctccagatgaactccctgagagccgaggacaccgccgtgtactactgtagcagatggggcggagccggagcctacgctatggatgtttggggccagggaaccctggtcaccgtgtcatctacgcgtggaatgaggactgaggatcttcccaaagctgtcgtctttctcgaaccccaatggtatcgggtgctcgaaaaagactctgtgacactgaaatgccaaggggcctactctcccgaggacaactccacacagtggtttcataatgagtccctcatcagctctcaggccagctcttatttcattgatgccgctacagtggacgactccggcgagtatcggtgtcagaccaatctgtctacactgtctgaccccgtgcagcttgaggtccacattggatggttgctcttgcaagccccacgctgggttttcaaagaggaagatccaatccatctgcggtgccacagctggaaaaacaccgctctccacaaagtcacatacctgcaaaatggcaaaggacgcaaatacttccatcacaattccgatttttacattccgaaggctaccctgaaagacagcggcagctatttctgccggggactcgtcggctccaagaatgtgtcctccgaaaccgtgaatatcacgattacccaaggactggctgtgcctacaatctctagcttctttccgcctggataccaagtctccttctgtcttgtgatggtcctcctgtttgctgtggacacaggactgtacttttccgtgaaaacgaacatccgcagctccacacgcgattggaaagatcacaagtttaaatggcgcaaagatccccaggacaagcgcgccaagagaagcggatctggcgtgaagcagaccctgaatttcgacctgctgaagctggctggcgacgtggaatccaacccaggcccttctagaggccatatgaccgagtacaagcccacggtgcgcctcgccacccgcgacgacgtccccagggccgtacgcaccctcgccgccgcgttcgccgactaccccgccacgcgccacaccgtcgatccggaccgccacatcgagcgggtcaccgagctgcaagaactcttcctcacgcgcgtcgggctcgacatcggcaaggtgtgggtcgcggacgacggcgccgcggtggcggtctggaccacgccggagagcgtcgaagcgggggcggtgttcgccgagatcggcccgcgcatggccgagttgagcggttcccggctggccgcgcagcaacagatggaaggcctcctggcgccgcaccggcccaaggagcccgcgtggttcctggccaccgtcggcgtctcgcccgaccaccagggcaagggtctgggcagcgccgtcgtgctccccggagtggaggcggccgagcgcgccggggtgcccgccttcctggagacctccgcgccccgcaacctccccttctacgagcggctcggcttcaccgtcaccgccgacgtcgaggtgcccgaaggaccgcgcacctggtgcatgacccgcaagcccggtgcctga

SEQ ID NO: 9341 - DNA, 2229 bp, Artificial Sequence
  Synthetic Polynucleotide
atggccttaccagtgaccgccttgctcctgccgctggccttgctgctccacgccgccaggccggaggtgcagctggttgaatctggcggaggactggttcagcctggcggatctctgagactgtcctgcacattttccggcggcaccttcagcagctacacaatgggctggttcagacaggcccctggcaaagaacgggaatttgtggccgaagtccgatggggcggagtgaccacatacagcaacagcctgaaggacagattcagcatcagcgaggacagcgtgaagaacgccgtgtacctccagatgaactccctgaagcctgaggacacagccgtgtactattgtgccgctgtgcggcagatgtacatgaccgtggtgcctgattattggggccagggcacactggtcacagtgtctagcctcgagagcggcggaggcggatctttcgaagtgcagctgcttgaaagtggcggcggactgattcagcctggcggatctctgagactgagctgtgccgccagcggcttcaccttttctagccacgccatgacctgggtccgacaggcacctggaaaagggcttgaatgggtgtccgccatcagcggctctggcgattacacacactacgccgacagcgtgaagggcagattcaccatcagcagagacaacagcaagaacaccgtgtacctccagatgaacagcctgagagccgaggacagcgccgtgtattattgcgccaaggatgaggatggcggcagcctgcttggacacagaggacaaggcaccctggtcaccgtttcttccacgcgtggaatgaggactgaggatcttcccaaagctgtcgtctttctcgaaccccaatggtatcgggtgctcgaaaaagactctgtgacactgaaatgccaaggggcctactctcccgaggacaactccacacagtggtttcataatgagtccctcatcagctctcaggccagctcttatttcattgatgccgctacagtggacgactccggcgagtatcggtgtcagaccaatctgtctacactgtctgaccccgtgcagcttgaggtccacattggatggttgctcttgcaagccccacgctgggttttcaaagaggaagatccaatccatctgcggtgccacagctggaaaaacaccgctctccacaaagtcacatacctgcaaaatggcaaaggacgcaaatacttccatcacaattccgatttttacattccgaaggctaccctgaaagacagcggcagctatttctgccggggactcgtcggctccaagaatgtgtcctccgaaaccgtgaatatcacgattacccaaggactggctgtgcctacaatctctagcttctttccgcctggataccaagtctccttctgtcttgtgatggtcctcctgtttgctgtggacacaggactgtacttttccgtgaaaacgaacatccgcagctccacacgcgattggaaagatcacaagtttaaatggcgcaaagatccccaggacaagcgcgccaagagaagcggatctggcgtgaagcagaccctgaatttcgacctgctgaagctggctggcgacgtggaatccaacccaggcccttctagaggccatatgaccgagtacaagcccacggtgcgcctcgccacccgcgacgacgtccccagggccgtacgcaccctcgccgccgcgttcgccgactaccccgccacgcgccacaccgtcgatccggaccgccacatcgagcgggtcaccgagctgcaagaactcttcctcacgcgcgtcgggctcgacatcggcaaggtgtgggtcgcggacgacggcgccgcggtggcggtctggaccacgccggagagcgtcgaagcgggggcggtgttcgccgagatcggcccgcgcatggccgagttgagcggttcccggctggccgcgcagcaacagatggaaggcctcctggcgccgcaccggcccaaggagcccgcgtggttcctggccaccgtcggcgtctcgcccgaccaccagggcaagggtctgggcagcgccgtcgtgctccccggagtggaggcggccgagcgcgccggggtgcccgccttcctggagacctccgcgccccgcaacctccccttctacgagcggctcggcttcaccgtcaccgccgacgtcgaggtgcccgaaggaccgcgcacctggtgcatgacccgcaagcccggtgcctga

SEQ ID NO: 9342 - DNA, 2223 bp, Artificial Sequence
  Synthetic Polynucleotide
atggccttaccagtgaccgccttgctcctgccgctggccttgctgctccacgccgccaggccgcagctccagctgcaagagtctggacctggcctggtcaagcctagcgagacactgagcctgacctgtaccgtgtccggcgatagcatcagcagcggcgattactactggggctggatcagacagcctcctggcaaaggactggaatggatcggccacatctactacagcggcgtgacctactacaaccccagcctgaagtccagagtgaccatcagcgtggacaccagccggaaccagttctccctgaagctgtctagcgtgacagccgccgataccgccgtgtactactgcaccagagaggacagcagcaactggcggagtagaggccagggaacactggtcacagttagctctctcgagagcggcggaggcggatctttcgaagtgcaactggtggaaagcggaggcggacttgttcaaccaggcggaagcctgagactgagctgtgccgcttccggctttaatatcaaagacacatgcatcggatgggttcgccgcgctccagggaaagaagaggaactggttgccgacatctgtccctacaagggcagcacaagatatgccgactccgtgaaaggccggtttaccatctctgccgacacctctaagaatacggcctatctgcaaatgaactctctgcgggccgaagatacagccgtgtattactgcgccatcgtgtctgccagagatggctactataactattggggacagggaaccacagtcacagtgtcctctacgcgtggaatgaggactgaggatcttcccaaagctgtcgtctttctcgaaccccaatggtatcgggtgctcgaaaaagactctgtgacactgaaatgccaaggggcctactctcccgaggacaactccacacagtggtttcataatgagtccctcatcagctctcaggccagctcttatttcattgatgccgctacagtggacgactccggcgagtatcggtgtcagaccaatctgtctacactgtctgaccccgtgcagcttgaggtccacattggatggttgctcttgcaagccccacgctgggttttcaaagaggaagatccaatccatctgcggtgccacagctggaaaaacaccgctctccacaaagtcacatacctgcaaaatggcaaaggacgcaaatacttccatcacaattccgatttttacattccgaaggctaccctgaaagacagcggcagctatttctgccggggactcgtcggctccaagaatgtgtcctccgaaaccgtgaatatcacgattacccaaggactggctgtgcctacaatctctagcttctttccgcctggataccaagtctccttctgtcttgtgatggtcctcctgtttgctgtggacacaggactgtacttttccgtgaaaacgaacatccgcagctccacacgcgattggaaagatcacaagtttaaatggcgcaaagatccccaggacaagcgcgccaagagaagcggatctggcgtgaagcagaccctgaatttcgacctgctgaagctggctggcgacgtggaatccaacccaggcccttctagaggccatatgaccgagtacaagcccacggtgcgcctcgccacccgcgacgacgtccccagggccgtacgcaccctcgccgccgcgttcgccgactaccccgccacgcgccacaccgtcgatccggaccgccacatcgagcgggtcaccgagctgcaagaactcttcctcacgcgcgtcgggctcgacatcggcaaggtgtgggtcgcggacgacggcgccgcggtggcggtctggaccacgccggagagcgtcgaagcgggggcggtgttcgccgagatcggcccgcgcatggccgagttgagcggttcccggctggccgcgcagcaacagatggaaggcctcctggcgccgcaccggcccaaggagcccgcgtggttcctggccaccgtcggcgtctcgcccgaccaccagggcaagggtctgggcagcgccgtcgtgctccccggagtggaggcggccgagcgcgccggggtgcccgccttcctggagacctccgcgccccgcaacctccccttctacgagcggctcggcttcaccgtcaccgccgacgtcgaggtgcccgaaggaccgcgcacctggtgcatgacccgcaagcccggtgcctga

SEQ ID NO: 9343 - DNA, 2247 bp, Artificial Sequence
  Synthetic Polynucleotide
atggccttaccagtgaccgccttgctcctgccgctggccttgctgctccacgccgccaggccgcagctccagctgcaagagtctggacctggcctggtcaagcctagcgagacactgagcctgacctgtaccgtgtccggcgatagcatcagcagcggcgattactactggggctggatcagacagcctcctggcaaaggactggaatggatcggccacatctactacagcggcgtgacctactacaaccccagcctgaagtccagagtgaccatcagcgtggacaccagccggaaccagttctccctgaagctgtctagcgtgacagccgccgataccgccgtgtactactgcaccagagaggacagcagcaactggcggagtagaggccagggaacactggtcacagttagctctctcgagagcggcggaggcggatctttcgaagttcagttggtagagtctggaggcggagtggtacaaccggggcggtctcttagacttagttgcgcagcaagcggtttctctttctctggctatgggatgcactgggtgagacaggcccctgggaaaggactggagtgggtggcctacatttcatacgacgggagtaataaatactatgcagactccgttaagggcaggttcacgatctctcgggacaattccaagaatacattgtatcttcagatgaatagtctccgagctgaagacacggcggtttactactgcgctaaagacccggcctggggacttcgacttggagagagttctagctacgattttgacatttggggacaagggacaatggtcactgtctcaagtacgcgtggaatgaggactgaggatcttcccaaagctgtcgtctttctcgaaccccaatggtatcgggtgctcgaaaaagactctgtgacactgaaatgccaaggggcctactctcccgaggacaactccacacagtggtttcataatgagtccctcatcagctctcaggccagctcttatttcattgatgccgctacagtggacgactccggcgagtatcggtgtcagaccaatctgtctacactgtctgaccccgtgcagcttgaggtccacattggatggttgctcttgcaagccccacgctgggttttcaaagaggaagatccaatccatctgcggtgccacagctggaaaaacaccgctctccacaaagtcacatacctgcaaaatggcaaaggacgcaaatacttccatcacaattccgatttttacattccgaaggctaccctgaaagacagcggcagctatttctgccggggactcgtcggctccaagaatgtgtcctccgaaaccgtgaatatcacgattacccaaggactggctgtgcctacaatctctagcttctttccgcctggataccaagtctccttctgtcttgtgatggtcctcctgtttgctgtggacacaggactgtacttttccgtgaaaacgaacatccgcagctccacacgcgattggaaagatcacaagtttaaatggcgcaaagatccccaggacaagcgcgccaagagaagcggatctggcgtgaagcagaccctgaatttcgacctgctgaagctggctggcgacgtggaatccaacccaggcccttctagaggccatatgaccgagtacaagcccacggtgcgcctcgccacccgcgacgacgtccccagggccgtacgcaccctcgccgccgcgttcgccgactaccccgccacgcgccacaccgtcgatccggaccgccacatcgagcgggtcaccgagctgcaagaactcttcctcacgcgcgtcgggctcgacatcggcaaggtgtgggtcgcggacgacggcgccgcggtggcggtctggaccacgccggagagcgtcgaagcgggggcggtgttcgccgagatcggcccgcgcatggccgagttgagcggttcccggctggccgcgcagcaacagatggaaggcctcctggcgccgcaccggcccaaggagcccgcgtggttcctggccaccgtcggcgtctcgcccgaccaccagggcaagggtctgggcagcgccgtcgtgctccccggagtggaggcggccgagcgcgccggggtgcccgccttcctggagacctccgcgccccgcaacctccccttctacgagcggctcggcttcaccgtcaccgccgacgtcgaggtgcccgaaggaccgcgcacctggtgcatgacccgcaagcccggtgcctga

SEQ ID NO: 9344 - DNA, 1755 bp, Artificial Sequence
  Synthetic Polynucleotide
atggccttaccagtgaccgccttgctcctgccgctggccttgctgctccacgccgccaggccgatgctgcccgctcctaagaatctggtggtgtccagaatcaccgaggacagcgccagactgtcttggacagctcctgatgccgccttcgacagcttccccatccggtacatcgagacactgatctggggcgaagccatctggctggatgtgcctggaagcgagagaagctacgacctgaccggactgaagcctggcacagagtatgccgtggtcatcaccggcgtgaaaggcggcagattctctagccctctggtggcctctttcaccaccacgcgtggaatgaggactgaggatcttcccaaagctgtcgtctttctcgaaccccaatggtatcgggtgctcgaaaaagactctgtgacactgaaatgccaaggggcctactctcccgaggacaactccacacagtggtttcataatgagtccctcatcagctctcaggccagctcttatttcattgatgccgctacagtggacgactccggcgagtatcggtgtcagaccaatctgtctacactgtctgaccccgtgcagcttgaggtccacattggatggttgctcttgcaagccccacgctgggttttcaaagaggaagatccaatccatctgcggtgccacagctggaaaaacaccgctctccacaaagtcacatacctgcaaaatggcaaaggacgcaaatacttccatcacaattccgatttttacattccgaaggctaccctgaaagacagcggcagctatttctgccggggactcgtcggctccaagaatgtgtcctccgaaaccgtgaatatcacgattacccaaggactggctgtgcctacaatctctagcttctttccgcctggataccaagtctccttctgtcttgtgatggtcctcctgtttgctgtggacacaggactgtacttttccgtgaaaacgaacatccgcagctccacacgcgattggaaagatcacaagtttaaatggcgcaaagatccccaggacaagcgcgccaagagaagcggatctggcgtgaagcagaccctgaatttcgacctgctgaagctggctggcgacgtggaatccaacccaggcccttctagaggccatatgaccgagtacaagcccacggtgcgcctcgccacccgcgacgacgtccccagggccgtacgcaccctcgccgccgcgttcgccgactaccccgccacgcgccacaccgtcgatccggaccgccacatcgagcgggtcaccgagctgcaagaactcttcctcacgcgcgtcgggctcgacatcggcaaggtgtgggtcgcggacgacggcgccgcggtggcggtctggaccacgccggagagcgtcgaagcgggggcggtgttcgccgagatcggcccgcgcatggccgagttgagcggttcccggctggccgcgcagcaacagatggaaggcctcctggcgccgcaccggcccaaggagcccgcgtggttcctggccaccgtcggcgtctcgcccgaccaccagggcaagggtctgggcagcgccgtcgtgctccccggagtggaggcggccgagcgcgccggggtgcccgccttcctggagacctccgcgccccgcaacctccccttctacgagcggctcggcttcaccgtcaccgccgacgtcgaggtgcccgaaggaccgcgcacctggtgcatgacccgcaagcccggtgcctga

SEQ ID NO: 9345 - DNA, 2823 bp, Artificial Sequence
  Synthetic Polynucleotide
atggccttaccagtgaccgccttgctcctgccgctggccttgctgctccacgccgccaggccggcatgcgatgaaggtggcggcggatctatgggatcttggagcgagttctgggtccgactgggagccatcagagaaagactggatgccctcggaggaagcgaagccgaactggccgccttcgagaaagagatcgccgcctttgagagcgagctgcaagcctacaaaggcaagggcaaccccgaggtggaaaagctgagatacaccgccgctaccatccggcggtttctccaggcttacagacacaatggtaccggcggaggcggatcaggcggcggaggtagcggtggcggtggttctggactggaaaagtgcttccagaccgagaatcccctggaatgccaggacaagggcgaagaggaactccagaagtacatccaagagtctcaggccctggctaagagaagctgcggcctgtttcagaagctgggcgagtattacctccagaacgccttcctggtggcctacaccaagaaagcccctcagctgacaagcagcgagctgatggctatcacccggaagatggccgccacagccgctacatgttgtcagctcagcgaggacaaactgctggcctgtggcgaaggcgctgccgacatcattatcggccacctgtgcatccggcacgaaatgacccctgtgaatcctggcgtgggccagtgttgtacaagcagctacgccaacagacggccctgctttagcagcctggtggtggacgaaacctacgtgccaccagccttcagcgacgacaagttcatcttccacaaggacctgtgtcaggcccagggcgttgccctccagacaatgaagcaagagttcctgattaacctggtcaagcagaagccccagatcaccgaggaacagctggaagccgtgatcgccgatttcagcggcctgctggaaaaatgctgtcagggccaagagcaagaagtgtgcttcgccgaggaaggccagaagctgatctccaagacaagagccgctctcggcgttggaggcggaggttctggtggtggtggaagcggaggtggtggtagtgggcccatgggcagctgggatgagttcggcagaaggctgtacgccattgagtggcggctgtatgcccttggcggatctgaagctgagctggccgcttttgaaaaagaaattgccgctttcgagtccgagcttcaggcttacaaaggcaaagggaatcctgaggtcgagaaactgcgggaaatcgccgccgtgatccggtccaatctccaggcatatcggcataatggatccggtggtggcggtagtggtggcggaggaagtggcggcggaggatctcaccaccatcaccatcatcatcaccaccatacgcgtggaatgaggactgaggatcttcccaaagctgtcgtctttctcgaaccccaatggtatcgggtgctcgaaaaagactctgtgacactgaaatgccaaggggcctactctcccgaggacaactccacacagtggtttcataatgagtccctcatcagctctcaggccagctcttatttcattgatgccgctacagtggacgactccggcgagtatcggtgtcagaccaatctgtctacactgtctgaccccgtgcagcttgaggtccacattggatggttgctcttgcaagccccacgctgggttttcaaagaggaagatccaatccatctgcggtgccacagctggaaaaacaccgctctccacaaagtcacatacctgcaaaatggcaaaggacgcaaatacttccatcacaattccgatttttacattccgaaggctaccctgaaagacagcggcagctatttctgccggggactcgtcggctccaagaatgtgtcctccgaaaccgtgaatatcacgattacccaaggactggctgtgcctacaatctctagcttctttccgcctggataccaagtctccttctgtcttgtgatggtcctcctgtttgctgtggacacaggactgtacttttccgtgaaaacgaacatccgcagctccacacgcgattggaaagatcacaagtttaaatggcgcaaagatccccaggacaagcgcgccaagagaagcggatctggcgtgaagcagaccctgaatttcgacctgctgaagctggctggcgacgtggaatccaacccaggcccttctagaggccatatgaccgagtacaagcccacggtgcgcctcgccacccgcgacgacgtccccagggccgtacgcaccctcgccgccgcgttcgccgactaccccgccacgcgccacaccgtcgatccggaccgccacatcgagcgggtcaccgagctgcaagaactcttcctcacgcgcgtcgggctcgacatcggcaaggtgtgggtcgcggacgacggcgccgcggtggcggtctggaccacgccggagagcgtcgaagcgggggcggtgttcgccgagatcggcccgcgcatggccgagttgagcggttcccggctggccgcgcagcaacagatggaaggcctcctggcgccgcaccggcccaaggagcccgcgtggttcctggccaccgtcggcgtctcgcccgaccaccagggcaagggtctgggcagcgccgtcgtgctccccggagtggaggcggccgagcgcgccggggtgcccgccttcctggagacctccgcgccccgcaacctccccttctacgagcggctcggcttcaccgtcaccgccgacgtcgaggtgcccgaaggaccgcgcacctggtgcatgacccgcaagcccggtgcctga

SEQ ID NO: 9346 - DNA, 1638 bp, Artificial Sequence
  Synthetic Polynucleotide
atggactggatttggcgcatccttttccttgtcggcgctgctaccggcgcccattccgaattcatggaccccgacctggaaatcagagccgccttcctgcggcagagaaacacagccctgagaacagaggtggccgagctggaacaagaggtgcagcggctggaaaacgaggtgtcccagtacgagacaagatacggccctctcggaggcggaaaaacgcgtggaatgaggactgaggatcttcccaaagctgtcgtctttctcgaaccccaatggtatcgggtgctcgaaaaagactctgtgacactgaaatgccaaggggcctactctcccgaggacaactccacacagtggtttcataatgagtccctcatcagctctcaggccagctcttatttcattgatgccgctacagtggacgactccggcgagtatcggtgtcagaccaatctgtctacactgtctgaccccgtgcagcttgaggtccacattggatggttgctcttgcaagccccacgctgggttttcaaagaggaagatccaatccatctgcggtgccacagctggaaaaacaccgctctccacaaagtcacatacctgcaaaatggcaaaggacgcaaatacttccatcacaattccgatttttacattccgaaggctaccctgaaagacagcggcagctatttctgccggggactcgtcggctccaagaatgtgtcctccgaaaccgtgaatatcacgattacccaaggactggctgtgcctacaatctctagcttctttccgcctggataccaagtctccttctgtcttgtgatggtcctcctgtttgctgtggacacaggactgtacttttccgtgaaaacgaacatccgcagctccacacgcgattggaaagatcacaagtttaaatggcgcaaagatccccaggacaagcgcgccaagagaagcggatctggcgtgaagcagaccctgaatttcgacctgctgaagctggctggcgacgtggaatccaacccaggcccttctagaggccatatgaccgagtacaagcccacggtgcgcctcgccacccgcgacgacgtccccagggccgtacgcaccctcgccgccgcgttcgccgactaccccgccacgcgccacaccgtcgatccggaccgccacatcgagcgggtcaccgagctgcaagaactcttcctcacgcgcgtcgggctcgacatcggcaaggtgtgggtcgcggacgacggcgccgcggtggcggtctggaccacgccggagagcgtcgaagcgggggcggtgttcgccgagatcggcccgcgcatggccgagttgagcggttcccggctggccgcgcagcaacagatggaaggcctcctggcgccgcaccggcccaaggagcccgcgtggttcctggccaccgtcggcgtctcgcccgaccaccagggcaagggtctgggcagcgccgtcgtgctccccggagtggaggcggccgagcgcgccggggtgcccgccttcctggagacctccgcgccccgcaacctccccttctacgagcggctcggcttcaccgtcaccgccgacgtcgaggtgcccgaaggaccgcgcacctggtgcatgacccgcaagcccggtgcctga

SEQ ID NO: 9347 - DNA, 2307 bp, Artificial Sequence
  Synthetic Polynucleotide
atggccttaccagtgaccgccttgctcctgccgctggccttgctgctccacgccgccaggccggacatccagatgacacagagccctagcagcctgtctgccagcgtgggagacagagtgaccatcacatgcaaggccagcgaccacatcaacaactggctggcctggtatcagcagaagcctggacaggcccctaagctgctgatctacggcgctaccacactggaaacaggcgtgcccagcagattttctggcagcggctctggcaccgactacaccctgacaatatccagcctccagcctgaggacttcgccacctactactgtcagcagagctggaacaccccttggacattcggccagggcaccaagctggaaatcaagagaggcggaggcggaagtggaggcggaggatctggcggcggaggctctcaagttcagcttcaacagcctggcgctgagctggtcaaacctggcgcttctgtgaagatgagctgcaaagccagcggctacgccttcagcagctactggatcaactggatgaagcagaaacccggccagggactcgaatggatcggccaaatctatcccggcgacggcgacaccaactacaacggcaagttcaagggcagagccacactgaccgccgatacctctagcagcacagcctacatgcagctgagcagcctgaccagcgaagatagcgccgtgtacttctgtgcccggtccatcacaacagtcgtgggctgcgctatggactattggggccagggaacaagcgtgaccgtgtctagtacgcgtactccagctgctccacctaaagctgtcctgaagctcgaacctcaatggattaacgtcctccaagaagattctgtcaccctgacatgccggggcacccactctccagagtctgattccattcagtggtttcataatgggaacctgattccgactcacacgcagcccagctatcggtttaaagctaacaacaatgactccggggagtatacttgccagacaggacagaccagcctgtctgacccagtgcacctgacagttctgagcgaatggctcgtcctgcagacccctcatcttgagttccaagagggcgaaaccattgtcctgagatgccactcctggaaagataagccccttgtgaaagtcacattttttcagaatggcaagagcaagaagttttctcggagcgatccgaatttcagtattccccaggccaaccactctcacagcggagactatcactgtacaggcaacatcgggtatacactctacagctctaagcccgtcacaattaccgttcaggctcccagcagctccccaatgggcattattgtggccgtcgtgaccggaattgctgtggccgcaatcgtggcagctgtcgtcgctctgatctattgcagaaagaagcggatcagcgccctgccagggtatcctgagtgccgcgaaatgggcgaaactctgcctgagaaacctgctaaccccacaaatcccgatgaagctgacaaagtcggcgctgaaaacacgatcacatactccctgctcatgcatcctgacgctcttgaggaacctgacgatcagaaccggatccgcgccaagagaagcggatctggcgtgaagcagaccctgaatttcgacctgctgaagctggctggcgacgtggaatccaacccaggcccttctagaggccatatgaccgagtacaagcccacggtgcgcctcgccacccgcgacgacgtccccagggccgtacgcaccctcgccgccgcgttcgccgactaccccgccacgcgccacaccgtcgatccggaccgccacatcgagcgggtcaccgagctgcaagaactcttcctcacgcgcgtcgggctcgacatcggcaaggtgtgggtcgcggacgacggcgccgcggtggcggtctggaccacgccggagagcgtcgaagcgggggcggtgttcgccgagatcggcccgcgcatggccgagttgagcggttcccggctggccgcgcagcaacagatggaaggcctcctggcgccgcaccggcccaaggagcccgcgtggttcctggccaccgtcggcgtctcgcccgaccaccagggcaagggtctgggcagcgccgtcgtgctccccggagtggaggcggccgagcgcgccggggtgcccgccttcctggagacctccgcgccccgcaacctccccttctacgagcggctcggcttcaccgtcaccgccgacgtcgaggtgcccgaaggaccgcgcacctggtgcatgacccgcaagcccggtgcctga

SEQ ID NO: 9348 - DNA, 1845 bp, Artificial Sequence
  Synthetic Polynucleotide
atggccttaccagtgaccgccttgctcctgccgctggccttgctgctccacgccgccaggccggacatccagatgacacagactacatcctccctgtctgcctctctgggagacagagtcaccatcagttgcagggcaagtcaggacattagtaaatatttaaattggtatcagcagaaaccagatggaactgttaaactcctgatctaccatacatcaagattacactcaggagtcccatcaaggttcagtggcagtgggtctggaacagattattctctcaccattagcaacctggagcaagaagatattgccacttacttttgccaacagggtaatacgcttccgtacacgttcggaggggggaccaagctggagatcacaggtggcggtggctcgggcggtggtgggtcgggtggcggcggatctgaggtgaaactgcaggagtcaggacctggcctggtggcgccctcacagagcctgtccgtcacatgcactgtctcaggggtctcattacccgactatggtgtaagctggattcgccagcctccacgaaagggtctggagtggctgggagtaatatggggtagtgaaaccacatactataattcagctctcaaatccagactgaccatcatcaaggacaactccaagagccaagttttcttaaaaatgaacagtctgcaaactgatgacacagccatttactactgtgccaaacattattactacggtggtagctatgctatggactactggggtcaaggaacctcagtcaccgtctcctcactcgagaaaattgaagttatgtatcctcctccttacctagacaatgagaagagcaatggaaccattatccatgtgaaaggatccgtcgagaaagaacatccacagcttggcgctggcaccgtcctgttgcttagagccggattctatgccgtcagcttcctgtccgtggctgtgtggtggggcgatatttggtggaaaacgatgatggaattgagatccctcgatacgcagaaagccacatgccaccttcagcaagtcacagacttgccttggaccagcgtcagctctcccgtggaacgggaaattctgtatcatacagtggcccgcaccaagatttccgacgatgacgacgagcacacactgagggccaagcgatctggatctggagcaacaaacttctcactactcaaacaagcaggtgacgtggaggagaatcccgggcctactagaggccatatgaccgagtacaagcccacggtgcgcctcgccacccgcgacgacgtccccagggccgtacgcaccctcgccgccgcgttcgccgactaccccgccacgcgccacaccgtcgatccggaccgccacatcgagcgggtcaccgagctgcaagaactcttcctcacgcgcgtcgggctcgacatcggcaaggtgtgggtcgcggacgacggcgccgcggtggcggtctggaccacgccggagagcgtcgaagcgggggcggtgttcgccgagatcggcccgcgcatggccgagttgagcggttcccggctggccgcgcagcaacagatggaaggcctcctggcgccgcaccggcccaaggagcccgcgtggttcctggccaccgtcggcgtctcgcccgaccaccagggcaagggtctgggcagcgccgtcgtgctccccggagtggaggcggccgagcgcgccggggtgcccgccttcctggagacctccgcgccccgcaacctccccttctacgagcggctcggcttcaccgtcaccgccgacgtcgaggtgcccgaaggaccgcgcacctggtgcatgacccgcaagcccggtgcctga

SEQ ID NO: 9349 - DNA, 2400 bp, Artificial Sequence
  Synthetic Polynucleotide
atggccttaccagtgaccgccttgctcctgccgctggccttgctgctccacgccgccaggccggacatccagatgacacagagccctagcagcctgtctgccagcgtgggagacagagtgaccatcacatgcaaggccagcgaccacatcaacaactggctggcctggtatcagcagaagcctggacaggcccctaagctgctgatctacggcgctaccacactggaaacaggcgtgcccagcagattttctggcagcggctctggcaccgactacaccctgacaatatccagcctccagcctgaggacttcgccacctactactgtcagcagagctggaacaccccttggacattcggccagggcaccaagctggaaatcaagagaggcggaggcggaagtggaggcggaggatctggcggcggaggctctcaagttcagcttcaacagcctggcgctgagctggtcaaacctggcgcttctgtgaagatgagctgcaaagccagcggctacgccttcagcagctactggatcaactggatgaagcagaaacccggccagggactcgaatggatcggccaaatctatcccggcgacggcgacaccaactacaacggcaagttcaagggcagagccacactgaccgccgatacctctagcagcacagcctacatgcagctgagcagcctgaccagcgaagatagcgccgtgtacttctgtgcccggtccatcacaacagtcgtgggctgcgctatggactattggggccagggaacaagcgtgaccgtgtctagtacgcgtaaaattgaagttatgtatcctcctccttacctagacaatgagaagagcaatggaaccattatccatgtgaaagggggtaccgctgaaccccactttatggttccgaaagagaaacaagtcacgatttgttgccaagggaattacggggccgtcgagtatcagctccactttgagggctccctgtttgctgtggatcggcccaagccacctgaaagaatcaacaaagtccaattctatattcctgatatgaactcccgcatggcaggccagtattcatgtatctaccgcgtgggagaactttggagtgaaccctctaacctgctggacctcgtcgtgacagagatgtatgatacacccacactgtctgtgcaccctgggccagaagttatcagcggagaaaaagttaccttttattgccgcctcgataccgctacctctatgttcctcttgctgaaagagggccgcagctctcacgtgcagcgaggctacggaaaggtccaagctgagtttcctctcggccccgtgaccaccgctcacaggggcacatatagatgttttggctcttataacaatcatgcctggtcattcccatccgagcctgtgaaactgctggtcacaggcgatattgagaatacctctctggccccagaagatcctacattccccgccgacacatggggaacatatctgctgacaaccgaaaccgggctgcaaaaggaccatgctctgtgggatcataccgctcagaatctgcttcggatggggcttgcattcctggtcctggtggctcttgtctggtttctggtcgaggactggctgtcccggaagagaaccagagaaagagcttccagggccagcacctgggaaggcagacgcagactgaatactcagaccctgcgcgccaagagaagcggatctggcgtgaagcagaccctgaatttcgacctgctgaagctggctggcgacgtggaatccaacccaggcccttctagaggccatatgaccgagtacaagcccacggtgcgcctcgccacccgcgacgacgtccccagggccgtacgcaccctcgccgccgcgttcgccgactaccccgccacgcgccacaccgtcgatccggaccgccacatcgagcgggtcaccgagctgcaagaactcttcctcacgcgcgtcgggctcgacatcggcaaggtgtgggtcgcggacgacggcgccgcggtggcggtctggaccacgccggagagcgtcgaagcgggggcggtgttcgccgagatcggcccgcgcatggccgagttgagcggttcccggctggccgcgcagcaacagatggaaggcctcctggcgccgcaccggcccaaggagcccgcgtggttcctggccaccgtcggcgtctcgcccgaccaccagggcaagggtctgggcagcgccgtcgtgctccccggagtggaggcggccgagcgcgccggggtgcccgccttcctggagacctccgcgccccgcaacctccccttctacgagcggctcggcttcaccgtcaccgccgacgtcgaggtgcccgaaggaccgcgcacctggtgcatgacccgcaagcccggtgcctga

SEQ ID NO: 9350 - DNA, 2124 bp, Artificial Sequence
  Synthetic Polynucleotide
atggccttaccagtgaccgccttgctcctgccgctggccttgctgctccacgccgccaggccggacatccagatgacacagagccctagcagcctgtctgccagcgtgggagacagagtgaccatcacatgcaaggccagcgaccacatcaacaactggctggcctggtatcagcagaagcctggacaggcccctaagctgctgatctacggcgctaccacactggaaacaggcgtgcccagcagattttctggcagcggctctggcaccgactacaccctgacaatatccagcctccagcctgaggacttcgccacctactactgtcagcagagctggaacaccccttggacattcggccagggcaccaagctggaaatcaagagaggcggaggcggaagtggaggcggaggatctggcggcggaggctctcaagttcagcttcaacagcctggcgctgagctggtcaaacctggcgcttctgtgaagatgagctgcaaagccagcggctacgccttcagcagctactggatcaactggatgaagcagaaacccggccagggactcgaatggatcggccaaatctatcccggcgacggcgacaccaactacaacggcaagttcaagggcagagccacactgaccgccgatacctctagcagcacagcctacatgcagctgagcagcctgaccagcgaagatagcgccgtgtacttctgtgcccggtccatcacaacagtcgtgggctgcgctatggactattggggccagggaacaagcgtgaccgtgtctagtacgcgtaaaattgaagttatgtatcctcctccttacctagacaatgagaagagcaatggaaccattatccatgtgaaagggggtacctcccagccacctgaaattcggacactggaaggctcctccgcctttctgccctgtagctttaacgccagccaggggagactcgccatcggctctgtgacatggttccgggatgaagtcgtccctggaaaagaagttcgcaacggaacaccagagttcagaggcagactcgccccactggcaagctccagattcctgcatgaccatcaggctgaactgcacattagggacgtgcggggccacgatgcctccatctatgtgtgtcgggtcgaagtgcttggactcggcgtcggaactggaaacggcactaggctggtggtcgagaaagaacatccacagcttggcgctggcaccgtcctgttgcttagagccggattctatgccgtcagcttcctgtccgtggctgtggggtctacagtgtattaccagggaaaatgtctcacctggaaaggccccagacgccagcttccagctgttgttcctgctccactgccaccaccttgtggctcctctgctcacttgcttccaccagtgcctggcggacgcgccaagagaagcggatctggcgtgaagcagaccctgaatttcgacctgctgaagctggctggcgacgtggaatccaacccaggcccttctagaggccatatgaccgagtacaagcccacggtgcgcctcgccacccgcgacgacgtccccagggccgtacgcaccctcgccgccgcgttcgccgactaccccgccacgcgccacaccgtcgatccggaccgccacatcgagcgggtcaccgagctgcaagaactcttcctcacgcgcgtcgggctcgacatcggcaaggtgtgggtcgcggacgacggcgccgcggtggcggtctggaccacgccggagagcgtcgaagcgggggcggtgttcgccgagatcggcccgcgcatggccgagttgagcggttcccggctggccgcgcagcaacagatggaaggcctcctggcgccgcaccggcccaaggagcccgcgtggttcctggccaccgtcggcgtctcgcccgaccaccagggcaagggtctgggcagcgccgtcgtgctccccggagtggaggcggccgagcgcgccggggtgcccgccttcctggagacctccgcgccccgcaacctccccttctacgagcggctcggcttcaccgtcaccgccgacgtcgaggtgcccgaaggaccgcgcacctggtgcatgacccgcaagcccggtgcctga

SEQ ID NO: 9351 - DNA, 2340 bp, Artificial Sequence
  Synthetic Polynucleotide
atggccttaccagtgaccgccttgctcctgccgctggccttgctgctccacgccgccaggccggacatccagatgacacagagccctagcagcctgtctgccagcgtgggagacagagtgaccatcacatgcaaggccagcgaccacatcaacaactggctggcctggtatcagcagaagcctggacaggcccctaagctgctgatctacggcgctaccacactggaaacaggcgtgcccagcagattttctggcagcggctctggcaccgactacaccctgacaatatccagcctccagcctgaggacttcgccacctactactgtcagcagagctggaacaccccttggacattcggccagggcaccaagctggaaatcaagagaggcggaggcggaagtggaggcggaggatctggcggcggaggctctcaagttcagcttcaacagcctggcgctgagctggtcaaacctggcgcttctgtgaagatgagctgcaaagccagcggctacgccttcagcagctactggatcaactggatgaagcagaaacccggccagggactcgaatggatcggccaaatctatcccggcgacggcgacaccaactacaacggcaagttcaagggcagagccacactgaccgccgatacctctagcagcacagcctacatgcagctgagcagcctgaccagcgaagatagcgccgtgtacttctgtgcccggtccatcacaacagtcgtgggctgcgctatggactattggggccagggaacaagcgtgaccgtgtctagtacgcgtaaaattgaagttatgtatcctcctccttacctagacaatgagaagagcaatggaaccattatccatgtgaaagggggtaccgctcaggttctccagagtgtggcaggccagactctgactgtcagatgccagtatccaccaacaggctccctctatgagaaaaaaggatggtgtaaagaggcttctgccctcgtctgcatccggctggttacctctagcaagcccagaactatggcctggacatcccggtttacaatctgggatgaccctgatgccggatttttcacagtgacaatgacggatctgcgcgaggaagattccgggcactattggtgtagaatctacaggccctccgacaactccgtgtctaagtctgtgcgcttttacctggtcgtcagccctgccagtgcctccactcagacatcttggaccccaagggaccttgtgtcctctcagacacagacacagtcctgcgtgccaccaactgctggcgcaagacaggctccagagtctcccagcacaatccccgtcccttctcagccccagaactccacacttaggccaggaccagctgctccaatcgcactggtcccagtgttctgcggactgctggttgccaagtctctggtgctgagcgcactcctcgtttggtggggcgatatttggtggaaaacgatgatggaattgagatccctcgatacgcagaaagccacatgccaccttcagcaagtcacagacttgccttggaccagcgtcagctctcccgtggaacgggaaattctgtatcatacagtggcccgcaccaagatttccgacgatgacgacgagcacacactgcgcgccaagagaagcggatctggcgtgaagcagaccctgaatttcgacctgctgaagctggctggcgacgtggaatccaacccaggcccttctagaggccatatgaccgagtacaagcccacggtgcgcctcgccacccgcgacgacgtccccagggccgtacgcaccctcgccgccgcgttcgccgactaccccgccacgcgccacaccgtcgatccggaccgccacatcgagcgggtcaccgagctgcaagaactcttcctcacgcgcgtcgggctcgacatcggcaaggtgtgggtcgcggacgacggcgccgcggtggcggtctggaccacgccggagagcgtcgaagcgggggcggtgttcgccgagatcggcccgcgcatggccgagttgagcggttcccggctggccgcgcagcaacagatggaaggcctcctggcgccgcaccggcccaaggagcccgcgtggttcctggccaccgtcggcgtctcgcccgaccaccagggcaagggtctgggcagcgccgtcgtgctccccggagtggaggcggccgagcgcgccggggtgcccgccttcctggagacctccgcgccccgcaacctccccttctacgagcggctcggcttcaccgtcaccgccgacgtcgaggtgcccgaaggaccgcgcacctggtgcatgacccgcaagcccggtgcctga

SEQ ID NO: 9352 - DNA, 2649 bp, Artificial Sequence
  Synthetic Polynucleotide
atggccttaccagtgaccgccttgctcctgccgctggccttgctgctccacgccgccaggccggcatgcgaagtgcagctgcttgaaagtggcggcggactgattcagcctggcggatctctgagactgagctgtgccgccagcggcttcaccttttctagccacgccatgacctgggtccgacaagcacctggaaaagggcttgaatgggtgtccgccatcagcggctctggcgattacacacactacgccgacagcgtgaagggcagattcaccatcagcagagacaacagcaagaacaccgtgtacctccagatgaacagcctgagagccgaggacagcgccgtgtattattgcgccaaggatgaggatggcggcagcctgcttggacacagaggacaaggcaccctggtcaccgtttcttccggtaccggcggaggcggatctggcggcggaggtagcggtggcggaggatctgaattcgacatcgtgatgacacagagccccgccacactgtcactgtctccaggcgaaagagccacactgagctgtcggagcagcaagagcctccagaacgtgaacggcaacacctacctgtactggttccagcagaagcccggccagtctcctcagctcctgatctacagaatgagcaacctgaacagcggcgtgcccgacagattttctggcagcggaagcggcaccgagttcaccctgaccataagcagcctggaacctgaggacttcgccgtgtactactgtatgcagcacctggaataccccatcaccttcggagccggcaccaagctggaaatcaaaggcggaggcggaagtggaggcggaggatctggcggcggaggctctgaagtgcaactggttgaatctggcggcggactggttaagcctggcggatctctgaagctgagctgtgccgccagcggctacacctttaccagctacgtgatgcactgggtccgacaggcccctggcaaaggacttgagtggatcggctacatcaacccctacaacgatggcaccaagtacaacgagaagttccagggcagagtgaccatcagctccgacaagagcatcagcaccgcctacatggaactgagcagcctgagaagcgaggataccgccatgtactattgcgccagaggcacctactactacggcaccagagtgttcgactactggggccagggaaccctggtcacagtctcttctacgcgtggaatgaggactgaggatcttcccaaagctgtcgtctttctcgaaccccaatggtatcgggtgctcgaaaaagactctgtgacactgaaatgccaaggggcctactctcccgaggacaactccacacagtggtttcataatgagtccctcatcagctctcaggccagctcttatttcattgatgccgctacagtggacgactccggcgagtatcggtgtcagaccaatctgtctacactgtctgaccccgtgcagcttgaggtccacattggatggttgctcttgcaagccccacgctgggttttcaaagaggaagatccaatccatctgcggtgccacagctggaaaaacaccgctctccacaaagtcacatacctgcaaaatggcaaaggacgcaaatacttccatcacaattccgatttttacattccgaaggctaccctgaaagacagcggcagctatttctgccggggactcgtcggctccaagaatgtgtcctccgaaaccgtgaatatcacgattacccaaggactggctgtgcctacaatctctagcttctttccgcctggataccaagtctccttctgtcttgtgatggtcctcctgtttgctgtggacacaggactgtacttttccgtgaaaacgaacatccgcagctccacacgcgattggaaagatcacaagtttaaatggcgcaaagatccccaggacaagcgcgccaagagaagcggatctggcgtgaagcagaccctgaatttcgacctgctgaagctggctggcgacgtggaatccaacccaggcccttctagaggccatatgaccgagtacaagcccacggtgcgcctcgccacccgcgacgacgtccccagggccgtacgcaccctcgccgccgcgttcgccgactaccccgccacgcgccacaccgtcgatccggaccgccacatcgagcgggtcaccgagctgcaagaactcttcctcacgcgcgtcgggctcgacatcggcaaggtgtgggtcgcggacgacggcgccgcggtggcggtctggaccacgccggagagcgtcgaagcgggggcggtgttcgccgagatcggcccgcgcatggccgagttgagcggttcccggctggccgcgcagcaacagatggaaggcctcctggcgccgcaccggcccaaggagcccgcgtggttcctggccaccgtcggcgtctcgcccgaccaccagggcaagggtctgggcagcgccgtcgtgctccccggagtggaggcggccgagcgcgccggggtgcccgccttcctggagacctccgcgccccgcaacctccccttctacgagcggctcggcttcaccgtcaccgccgacgtcgaggtgcccgaaggaccgcgcacctggtgcatgacccgcaagcccggtgcctga

SEQ ID NO: 9353 - DNA, 1638 bp, Artificial Sequence
  Synthetic Polynucleotide
atggactggatttggcgcatccttttccttgtcggcgctgctaccggcgcgcattccttcgaatacgccaaagagatgcggaacgcctactgggagatcgccctgctgcccaatctgaccaaccagcagaagagagcccccatcagaaagctgtacgacgacccctcccagagcagcgagctgctgtctgaggctaaaaaactgaacgatagccagacgcgtggaatgaggactgaggatcttcccaaagctgtcgtctttctcgaaccccaatggtatcgggtgctcgaaaaagactctgtgacactgaaatgccaaggggcctactctcccgaggacaactccacacagtggtttcataatgagtccctcatcagctctcaggccagctcttatttcattgatgccgctacagtggacgactccggcgagtatcggtgtcagaccaatctgtctacactgtctgaccccgtgcagcttgaggtccacattggatggttgctcttgcaagccccacgctgggttttcaaagaggaagatccaatccatctgcggtgccacagctggaaaaacaccgctctccacaaagtcacatacctgcaaaatggcaaaggacgcaaatacttccatcacaattccgatttttacattccgaaggctaccctgaaagacagcggcagctatttctgccggggactcgtcggctccaagaatgtgtcctccgaaaccgtgaatatcacgattacccaaggactggctgtgcctacaatctctagcttctttccgcctggataccaagtctccttctgtcttgtgatggtcctcctgtttgctgtggacacaggactgtacttttccgtgaaaacgaacatccgcagctccacacgcgattggaaagatcacaagtttaaatggcgcaaagatccccaggacaagcgcgccaagagaagcggatctggcgtgaagcagaccctgaatttcgacctgctgaagctggctggcgacgtggaatccaacccaggcccttctagaggccatatgaccgagtacaagcccacggtgcgcctcgccacccgcgacgacgtccccagggccgtacgcaccctcgccgccgcgttcgccgactaccccgccacgcgccacaccgtcgatccggaccgccacatcgagcgggtcaccgagctgcaagaactcttcctcacgcgcgtcgggctcgacatcggcaaggtgtgggtcgcggacgacggcgccgcggtggcggtctggaccacgccggagagcgtcgaagcgggggcggtgttcgccgagatcggcccgcgcatggccgagttgagcggttcccggctggccgcgcagcaacagatggaaggcctcctggcgccgcaccggcccaaggagcccgcgtggttcctggccaccgtcggcgtctcgcccgaccaccagggcaagggtctgggcagcgccgtcgtgctccccggagtggaggcggccgagcgcgccggggtgcccgccttcctggagacctccgcgccccgcaacctccccttctacgagcggctcggcttcaccgtcaccgccgacgtcgaggtgcccgaaggaccgcgcacctggtgcatgacccgcaagcccggtgcctga

SEQ ID NO: 9354 - DNA, 3516 bp, Artificial Sequence
  Synthetic Polynucleotide
atggccttaccagtgaccgccttgctcctgccgctggccttgctgctccacgccgccaggccggcatgcgaagtgcagctgcttgaaagtggcggcggactgattcagcctggcggatctctgagactgagctgtgccgccagcggcttcaccttttctagccacgccatgacctgggtccgacaggcacctggaaaagggcttgaatgggtgtccgccatcagcggctctggcgattacacacactacgccgacagcgtgaagggcagattcaccatcagcagagacaacagcaagaacaccgtgtacctccagatgaacagcctgagagccgaggacagcgccgtgtattattgcgccaaggatgaggatggcggcagcctgcttggacacagaggacaaggcaccctggtcaccgtttcttccggtaccggcggaggcggatctggcggcggaggtagcggtggcggaggatctgaattcggcatgcggactgaagacctcccaaaggctgtggtgttcctggagcctcaatggtacagggtgctggagaaggacagtgtgactctgaagtgccagggagcctactcccctgaggacaattccacacagtggtttcacaatgagagcctcatctcaagccaggcctccagctacttcattgacgctgccacagtggacgacagtggagagtacaggtgccagacaaacctctccaccctcagtgacccggtgcagctagaagtccatatcggctggctgttgctccaggcccctcggtgggtgttcaaggaggaagaccctattcacctgaggtgtcacagctggaagaacactgctctgcataaggtcacatatttacagaatggcaaaggcaggaagtattttcatcataattctgacttctacattccaaaagccacactcaaagacagcggctcctacttctgcagggggcttgttgggagtaaaaatgtgtcttcagagactgtgaacatcaccatcactcaaggtttggcagtgtcaaccatctcatcattctttccacctggctaccaagtgtccttctgcctggtcatggtgctgctgttcgccgtggataccggcctgtacttcagcgtcaagaccaacatccggtccagcaccagagactggaaggaccacaagttcaagtggcggaaggaccctcaggacaagagggccaagcgatctggatctggagcaacaaacttctcactactcaaacaagcaggtgacgtggaggagaatcccgggcctactagtgccaccatggactggatttggcgcatccttttccttgtcggcgctgctaccggcgcccattccgggcccgaagtgcagctggttgaatctggcggaggactggttcaggctggcggatctctgagactgtcttgtgccgccagcggcagaacctttagcatgggctggtttagacaggcccctggcaaagagagagagttcgtcgccgccatcacatactctggcggcagcccttactacgccgactctgtgaagggcagattcaccatcagccgggacaacgccaagaacaccgtgtacctccagatgaacagcctgaagcctgaggacaccgccgtgtactactgcgccgccaatccaacatacggcagcgactggaacgccgagaattggggccagggaacccaagtgacagtgtctagcggatccggcggcggaggatctggcggaggcggatctgggggcggaggctctttcgaaggcagcacgcgtaaaggatgccagggaagcgccgaccatgtggtgtcaatttctggcgtgcccctgcaactccagccaaactctattcagaccaaagtcgatagcattgcctggaaaaaattgctgccctctcagaacgggtttcaccacattctcaaatgggaaaatggctctctgccctccaacacctccaacgatcggtttagctttatcgtcaagaatctgtccctgctcatcaaagcagcccagcagcaagactccggcctgtattgcctcgaagtcacctccatctccgggaaagtgcagacagctacattccaagtgttcgtctttgataaggtcgagaagcctagactccaaggacaggggaagattctggacagaggacggtgtcaggtggcactgtcttgccttgtcagccgcgacggcaatgtgtcttatgcttggtatcggggctccaagctgattcaaaccgctgggaatctgacatacctcgatgaagaggttgacatcaatgggacgcacacgtatacttgcaatgtctccaatcctgtcagctgggagtctcataccctgaacctgacacaggattgtcaaaatgcacatcaagagttccggttttggccgtttcttgtgattatcgtgattctgtctgccctcttcctcggaactctggcttgcttctgtgtctggcggcgcaaacggaaagagaaacagtctgagacttccccgaaagagtttctcacgatatacgaagatgtcaaggacctcaagacccgccgcaaccatgagcaagaacagacattcccaggcggaggctccacaatctactccatgattcagtcccagtctagcgccccaacctctcaagagcctgcttataccctgtacagtctgattcagccctccagaaagtccggctctcggaagaggaaccactctcctagcttcaactccaccatatatgaagtcattggcaagtctcagcccaaagcacagaatcctgccaggctgagcagaaaagaacttgagaatttcgacgtctactcccgcgccaagagaagcggatctggcgtgaagcagaccctgaatttcgacctgctgaagctggctggcgacgtggaatccaacccaggcccttctagaggccatatgaccgagtacaagcccacggtgcgcctcgccacccgcgacgacgtccccagggccgtacgcaccctcgccgccgcgttcgccgactaccccgccacgcgccacaccgtcgatccggaccgccacatcgagcgggtcaccgagctgcaagaactcttcctcacgcgcgtcgggctcgacatcggcaaggtgtgggtcgcggacgacggcgccgcggtggcggtctggaccacgccggagagcgtcgaagcgggggcggtgttcgccgagatcggcccgcgcatggccgagttgagcggttcccggctggccgcgcagcaacagatggaaggcctcctggcgccgcaccggcccaaggagcccgcgtggttcctggccaccgtcggcgtctcgcccgaccaccagggcaagggtctgggcagcgccgtcgtgctccccggagtggaggcggccgagcgcgccggggtgcccgccttcctggagacctccgcgccccgcaacctccccttctacgagcggctcggcttcaccgtcaccgccgacgtcgaggtgcccgaaggaccgcgcacctggtgcatgacccgcaagcccggtgcctga

SEQ ID NO: 9355 - DNA, 2454 bp, Artificial Sequence
  Synthetic Polynucleotide
atggccttaccagtgaccgccttgctcctgccgctggccttgctgctccacgccgccaggccggaattcaatgctggcgtgacccagacacctaagttccaggtgctgaaaaccggccagagcatgaccctgcaatgcgcccaggacatgaaccatgagtacatgagctggtacagacaggaccccggcatgggcctgagactgatccactactctgtggctatccagaccaccgaccagggcgaagtgcccaatggctacaacgtgtccagaagcaccatcgaggacttcccactgagactgctgtctgccgctcctagccagaccagcgtgtacttttgtgccagcagctacctgggcaacaccggcgagctgttttttggcgagggcagcagactgaccgtgctcgaggacctgaagaacgtgttcccacctgaggtggccgtgttcgagcctagcgaggccgagatcagccacacccagaaagccaccctcgtgtgcctggctaccggcttctaccccgaccatgtggaactgtcttggtgggtcaacggcaaagaggtgcacagcggcgtgtctaccgacccccagccactgaaagaacagcccgccctgaacgacagccggtactgcctgagcagcagactgagagtgtccgccaccttctggcagaacccccggaaccacttcagatgccaggtgcagttctacggcctgagcgagaacgacgagtggacccaggacagagccaagcccgtgacccagatcgtgtctgccgaagcctggggcagagccgattgcggatcccagagcttcggcctgctggaccccaagctgtgctacctgctggatggcatcctgttcatctacggcgtgatcctgaccgccctgttcctgagagtgaagttcagcagaagcgccgacgcccctgcctaccagcagggacagaaccaactgtacaacgagctgaacctgggcagacgggaagagtacgacgtgctggacaagcggagaggcagggaccctgagatgggcggaaagccccagcggagaaagaacccccaggaaggactgtataacgaactccagaaagacaagatggccgaagcctacagcgagatcggcatgaagggcgagcggagaagaggcaagggccacgatggcctgtaccagggcctgagcaccgccaccaaggacacctatgacgccctgcacatgcaggccctgcctccaagaagggccaagcgatctggatctggagcaacaaacttctcactactcaaacaagcaggtgacgtggaggagaatcccgggcctactagtatggactggatttggcgcatccttttccttgtcggcgctgctaccggcgcgcattccttcgaacaagaagtgacacagatccctgccgctctgtctgtgcctgagggcgaaaacctggtgctgaactgctccttcaccgacagcgccatctacaacctccagtggttcaggcaggaccctggaaagggactgacaagcctgctgctgatccagagcagccagagagagcagacctccggcagactgaatgccagcctggataagagcagcggcaggtctaccctgtatatcgccgcttctcagcctggcgatagcgccacatatctgtgtgctgtgcggcctacaagcggcggcagctacatccctacatttggcagaggcaccagcctgatcgtgcacccttatacgcgtatccagaaccctgatcctgccgtgtaccagctgcgggatagcaagagcagcgacaagagcgtgtgtctgttcaccgacttcgacagccagaccaacgtgtcccagagcaaggactccgacgtgtacatcaccgataagaccgtgctggacatgcggagcatggacttcaagagcaactccgccgtggcctggtccaacaagtccgatttcgcctgcgccaacgccttcaacaacagcattatccccgaggacacattcttcccaagccccgagagcagctgcggtacccagagttttgggttgttggaccctaaattgtgctatctgttggacggaatcctgttcatttacggagtgatcctgaccgcattgttcctgcgggttaagttttccagatccgcagacgcacccgcttaccaacaagggcagaaccaactctacaatgaacttaatttggggcggagggaagagtacgacgttctggacaaaaggaggggacgagatcccgagatgggcggaaagcctcagcgaaggaagaatccgcaagaggggctttataacgaactccagaaagataaaatggcagaagcctatagtgagattgggatgaagggagaaaggaggaggggtaaaggtcacgatgggttgtaccaaggattgagcacagccactaaagatacctatgatgcgctccacatgcaggccctgccgccaagataa

SEQ ID NO: 9356 - DNA, 2454 bp, Artificial Sequence
  Synthetic Polynucleotide
atggccttaccagtgaccgccttgctcctgccgctggccttgctgctccacgccgccaggccggaattccaagaagtgacacagatccctgccgctctgtctgtgcctgagggcgaaaacctggtgctgaactgctccttcaccgacagcgccatctacaacctccagtggttcaggcaggaccctggaaagggactgacaagcctgctgctgatccagagcagccagagagagcagacctccggcagactgaatgccagcctggataagagcagcggcaggtctaccctgtatatcgccgcttctcagcctggcgatagcgccacatatctgtgtgctgtgcggcctacaagcggcggcagctacatccctacatttggcagaggcaccagcctgatcgtgcacccttatacgcgtgacctgaagaacgtgttcccacctgaggtggccgtgttcgagcctagcgaggccgagatcagccacacccagaaagccaccctcgtgtgcctggctaccggcttctaccccgaccatgtggaactgtcttggtgggtcaacggcaaagaggtgcacagcggcgtgtctaccgacccccagccactgaaagaacagcccgccctgaacgacagccggtactgcctgagcagcagactgagagtgtccgccaccttctggcagaacccccggaaccacttcagatgccaggtgcagttctacggcctgagcgagaacgacgagtggacccaggacagagccaagcccgtgacccagatcgtgtctgccgaagcctggggcagagccgattgcggatcccagagcttcggcctgctggaccccaagctgtgctacctgctggatggcatcctgttcatctacggcgtgatcctgaccgccctgttcctgagagtgaagttcagcagaagcgccgacgcccctgcctaccagcagggacagaaccaactgtacaacgagctgaacctgggcagacgggaagagtacgacgtgctggacaagcggagaggcagggaccctgagatgggcggaaagccccagcggagaaagaacccccaggaaggactgtataacgaactccagaaagacaagatggccgaagcctacagcgagatcggcatgaagggcgagcggagaagaggcaagggccacgatggcctgtaccagggcctgagcaccgccaccaaggacacctatgacgccctgcacatgcaggccctgcctccaagaagggccaagcgatctggatctggagcaacaaacttctcactactcaaacaagcaggtgacgtggaggagaatcccgggcctactagtatggactggatttggcgcatccttttccttgtcggcgctgctaccggcgcgcattccttcgaaaatgctggcgtgacccagacacctaagttccaggtgctgaaaaccggccagagcatgaccctgcaatgcgcccaggacatgaaccatgagtacatgagctggtacagacaggaccccggcatgggcctgagactgatccactactctgtggctatccagaccaccgaccagggcgaagtgcccaatggctacaacgtgtccagaagcaccatcgaggacttcccactgagactgctgtctgccgctcctagccagaccagcgtgtacttttgtgccagcagctacctgggcaacaccggcgagctgttttttggcgagggcagcagactgaccgtgctcgagatccagaaccctgatcctgccgtgtaccagctgcgggatagcaagagcagcgacaagagcgtgtgtctgttcaccgacttcgacagccagaccaacgtgtcccagagcaaggactccgacgtgtacatcaccgataagaccgtgctggacatgcggagcatggacttcaagagcaactccgccgtggcctggtccaacaagtccgatttcgcctgcgccaacgccttcaacaacagcattatccccgaggacacattcttcccaagccccgagagcagctgcggtacccagagttttgggttgttggaccctaaattgtgctatctgttggacggaatcctgttcatttacggagtgatcctgaccgcattgttcctgcgggttaagttttccagatccgcagacgcacccgcttaccaacaagggcagaaccaactctacaatgaacttaatttggggcggagggaagagtacgacgttctggacaaaaggaggggacgagatcccgagatgggcggaaagcctcagcgaaggaagaatccgcaagaggggctttataacgaactccagaaagataaaatggcagaagcctatagtgagattgggatgaagggagaaaggaggaggggtaaaggtcacgatgggttgtaccaaggattgagcacagccactaaagatacctatgatgcgctccacatgcaggccctgccgccaagataa

SEQ ID NO: 9357 - DNA, 2952 bp, Artificial Sequence
  Synthetic Polynucleotide
atggccttaccagtgaccgccttgctcctgccgctggccttgctgctccacgccgccaggccggctatccagaccaccgaccagggcgaagtgcccaatggctacaacgtgtccagaagcaccatcgaggacttcccactgagactgctgtctgccgctcctagccagaccagcgtgtacttttgtgccagcagctacctgggcaacaccggcgagctgttttttggcgagggcagcagactgaccgtgctcgagggacagcctaaggccaatcctaccgtgacactgttccctccaagcagcgaagaactccaggccaacaaggccacacttgtgtgcctgatctccgacttctaccctggggctgtgacagtggcttggaaggccgatggatctcctgtgaaagccggcgtggaaaccaccaagccatccaagcagagcaacaacaaatacgccgccagctcctacctgagcctgacacctgagcagtggaagtcccacagatcctacagctgccaagtgacccacgaaggcagcaccgtggaaaagacagtggcccctacagagtgcagcggatcccagagcttcggcctgctggaccccaagctgtgctacctgctggatggcatcctgttcatctacggcgtgatcctgaccgccctgttcctgagagtgaagttcagcagaagcgccgacgcccctgcctaccagcagggacagaaccaactgtacaacgagctgaacctgggcagacgggaagagtacgacgtgctggacaagcggagaggcagggaccctgagatgggcggaaagccccagcggagaaagaacccccaggaaggactgtataacgaactccagaaagacaagatggccgaagcctacagcgagatcggcatgaagggcgagcggagaagaggcaagggccacgatggcctgtaccagggcctgagcaccgccaccaaggacacctatgacgccctgcacatgcaggccctgcctccaagaagggccaagcgatctggatctggagcaacaaacttctcactactcaaacaagcaggtgacgtggaggagaatcccgggcctactagtatggactggatttggcgcatccttttccttgtcggcgctgctaccggcgcgcattccttcgaacaagaagtgacacagatccctgccgctctgtctgtgcctgagggcgaaaacctggtgctgaactgctccttcaccgacagcgccatctacaacctccagtggttcaggcaggaccctggaaagggactgacaagcctgctgctgatccagagcagccagagagagcagacctccggcagactgaatgccagcctggataagagcagcggcaggtctaccctgtatatcgccgcttctcagcctggcgatagcgccacatatctgtgtgctgtgcggcctacaagcggcggcagctacatccctacatttggcagaggcaccagcctgatcgtgcacccttatacgcgtgcctctacaaagggaccctccgtgtttcctctggctcccagcagcaagtctacaagcggaggaacagccgctctgggctgcctggtcaaggattactttcccgagcctgtgaccgtgtcctggaatagcggagcactgacaagcggcgtgcacacctttccagccgtgctgcaaagcagcggcctgtactctctgagcagcgtggtcacagtgcctagctctagcctgggcacccagacctacatctgcaatgtgaaccacaagcctagcaacaccaaggtggacaagagagtggaacccaagagctgtggtacccagagttttgggttgttggaccctaaattgtgctatctgttggacggaatcctgttcatttacggagtgatcctgaccgcattgttcctgcgggttaagttttccagatccgcagacgcacccgcttaccaacaagggcagaaccaactctacaatgaacttaatttggggcggagggaagagtacgacgttctggacaaaaggaggggacgagatcccgagatgggcggaaagcctcagcgaaggaagaatccgcaagaggggctttataacgaactccagaaagataaaatggcagaagcctatagtgagattgggatgaagggagaaaggaggaggggtaaaggtcacgatgggttgtaccaaggattgagcacagccactaaagatacctatgatgcgctccacatgcaggccctgccgccaagacgcgccaagagaagcggatctggcgtgaagcagaccctgaatttcgacctgctgaagctggctggcgacgtggaatccaacccaggcccttctagaggccatatgaccgagtacaagcccacggtgcgcctcgccacccgcgacgacgtccccagggccgtacgcaccctcgccgccgcgttcgccgactaccccgccacgcgccacaccgtcgatccggaccgccacatcgagcgggtcaccgagctgcaagaactcttcctcacgcgcgtcgggctcgacatcggcaaggtgtgggtcgcggacgacggcgccgcggtggcggtctggaccacgccggagagcgtcgaagcgggggcggtgttcgccgagatcggcccgcgcatggccgagttgagcggttcccggctggccgcgcagcaacagatggaaggcctcctggcgccgcaccggcccaaggagcccgcgtggttcctggccaccgtcggcgtctcgcccgaccaccagggcaagggtctgggcagcgccgtcgtgctccccggagtggaggcggccgagcgcgccggggtgcccgccttcctggagacctccgcgccccgcaacctccccttctacgagcggctcggcttcaccgtcaccgccgacgtcgaggtgcccgaaggaccgcgcacctggtgcatgacccgcaagcccggtgcctga

SEQ ID NO: 9358 - DNA, 3006 bp, Artificial Sequence
  Synthetic Polynucleotide
atggccttaccagtgaccgccttgctcctgccgctggccttgctgctccacgccgccaggccggctatccagaccaccgaccagggcgaagtgcccaatggctacaacgtgtccagaagcaccatcgaggacttcccactgagactgctgtctgccgctcctagccagaccagcgtgtacttttgtgccagcagctacctgggcaacaccggcgagctgttttttggcgagggcagcagactgaccgtgctcgagggacagcctaaggccaatcctaccgtgacactgttccctccaagcagcgaagaactccaggccaacaaggccacacttgtgtgcctgatctccgacttctaccctggggctgtgacagtggcttggaaggccgatggatctcctgtgaaagccggcgtggaaaccaccaagccatccaagcagagcaacaacaaatacgccgccagctcctacctgagcctgacacctgagcagtggaagtcccacagatcctacagctgccaagtgacccacgaaggcagcaccgtggaaaagacagtggcccctacagagtgcagcggatcccagagcttcggcctgctggaccccaagctgtgctacctgctggatggcatcctgttcatctacggcgtgatcctgaccgccctgttcctgagagtgaagttcagcagaagcgccgacgcccctgcctaccagcagggacagaaccaactgtacaacgagctgaacctgggcagacgggaagagtacgacgtgctggacaagcggagaggcagggaccctgagatgggcggaaagccccagcggagaaagaacccccaggaaggactgtataacgaactccagaaagacaagatggccgaagcctacagcgagatcggcatgaagggcgagcggagaagaggcaagggccacgatggcctgtaccagggcctgagcaccgccaccaaggacacctatgacgccctgcacatgcaggccctgcctccaagaagggccaagcgatctggatctggagcaacaaacttctcactactcaaacaagcaggtgacgtggaggagaatcccgggcctactagtatggactggatttggcgcatccttttccttgtcggcgctgctaccggcgcgcattccttcgaacaagaagtgacacagatccctgccgctctgtctgtgcctgagggcgaaaacctggtgctgaactgctccttcaccgacagcgccatctacaacctccagtggttcaggcaggaccctggaaagggactgacaagcctgctgctgatccagagcagccagagagagcagacctccggcagactgaatgccagcctggataagagcagcggcaggtctaccctgtatatcgccgcttctcagcctggcgatagcgccacatatctgtgtgctgtgcggcctacaagcggcggcagctacatccctacatttggcagaggcaccagcctgatcgtgcacccttatacgcgtgcgtctcccacttctccgaaagttttccccctttccctctgtagcacacaacctgatggaaatgtggtcatcgcatgtctggtacaaggattctttccacaagagccattgagcgttacatggtcagagagcgggcagggagttaccgctaggaatttcccaccctcacaggatgcgagtggtgatctttataccacatcatcacaactcacgttgccagccactcagtgcctcgctggaaagtcagtaacatgccatgtcaaacattacactaatccctcacaagatgttaccgtgccttgcccagtaccttctacgccgcccaccccgtctccatctactccacccacgccatcacctagtggtacccagagttttgggttgttggaccctaaattgtgctatctgttggacggaatcctgttcatttacggagtgatcctgaccgcattgttcctgcgggttaagttttccagatccgcagacgcacccgcttaccaacaagggcagaaccaactctacaatgaacttaatttggggcggagggaagagtacgacgttctggacaaaaggaggggacgagatcccgagatgggcggaaagcctcagcgaaggaagaatccgcaagaggggctttataacgaactccagaaagataaaatggcagaagcctatagtgagattgggatgaagggagaaaggaggaggggtaaaggtcacgatgggttgtaccaaggattgagcacagccactaaagatacctatgatgcgctccacatgcaggccctgccgccaagacgcgccaagagaagcggatctggcgtgaagcagaccctgaatttcgacctgctgaagctggctggcgacgtggaatccaacccaggcccttctagaggccatatgaccgagtacaagcccacggtgcgcctcgccacccgcgacgacgtccccagggccgtacgcaccctcgccgccgcgttcgccgactaccccgccacgcgccacaccgtcgatccggaccgccacatcgagcgggtcaccgagctgcaagaactcttcctcacgcgcgtcgggctcgacatcggcaaggtgtgggtcgcggacgacggcgccgcggtggcggtctggaccacgccggagagcgtcgaagcgggggcggtgttcgccgagatcggcccgcgcatggccgagttgagcggttcccggctggccgcgcagcaacagatggaaggcctcctggcgccgcaccggcccaaggagcccgcgtggttcctggccaccgtcggcgtctcgcccgaccaccagggcaagggtctgggcagcgccgtcgtgctccccggagtggaggcggccgagcgcgccggggtgcccgccttcctggagacctccgcgccccgcaacctccccttctacgagcggctcggcttcaccgtcaccgccgacgtcgaggtgcccgaaggaccgcgcacctggtgcatgacccgcaagcccggtgcctga

SEQ ID NO: 9359 - DNA, 2964 bp, Artificial Sequence
  Synthetic Polynucleotide
gctagcaccatggccttaccagtgaccgccttgctcctgccgctggccttgctgctccacgccgccaggccggctatccagaccaccgaccagggcgaagtgcccaatggctacaacgtgtccagaagcaccatcgaggacttcccactgagactgctgtctgccgctcctagccagaccagcgtgtacttttgtgccagcagctacctgggcaacaccggcgagctgttttttggcgagggcagcagactgaccgtgctcgagggacagcctaaggccaatcctaccgtgacactgttccctccaagcagcgaagaactccaggccaacaaggccacacttgtgtgcctgatctccgacttctaccctggggctgtgacagtggcttggaaggccgatggatctcctgtgaaagccggcgtggaaaccaccaagccatccaagcagagcaacaacaaatacgccgccagctcctacctgagcctgacacctgagcagtggaagtcccacagatcctacagctgccaagtgacccacgaaggcagcaccgtggaaaagacagtggcccctacagagtgcagcggatcccagagcttcggcctgctggaccccaagctgtgctacctgctggatggcatcctgttcatctacggcgtgatcctgaccgccctgttcctgagagtgaagttcagcagaagcgccgacgcccctgcctaccagcagggacagaaccaactgtacaacgagctgaacctgggcagacgggaagagtacgacgtgctggacaagcggagaggcagggaccctgagatgggcggaaagccccagcggagaaagaacccccaggaaggactgtataacgaactccagaaagacaagatggccgaagcctacagcgagatcggcatgaagggcgagcggagaagaggcaagggccacgatggcctgtaccagggcctgagcaccgccaccaaggacacctatgacgccctgcacatgcaggccctgcctccaagaagggccaagcgatctggatctggagcaacaaacttctcactactcaaacaagcaggtgacgtggaggagaatcccgggcctactagtatggactggatttggcgcatccttttccttgtcggcgctgctaccggcgcgcattccttcgaacaagaagtgacacagatccctgccgctctgtctgtgcctgagggcgaaaacctggtgctgaactgctccttcaccgacagcgccatctacaacctccagtggttcaggcaggaccctggaaagggactgacaagcctgctgctgatccagagcagccagagagagcagacctccggcagactgaatgccagcctggataagagcagcggcaggtctaccctgtatatcgccgcttctcagcctggcgatagcgccacatatctgtgtgctgtgcggcctacaagcggcggcagctacatccctacatttggcagaggcaccagcctgatcgtgcacccttatacgcgtgcctccacgaagggaccatctgttttccctcttgccccctgctcacggtcaacgtctgaatccacggcagccctgggctgcctcgttaaggactactttccagagccggtaacagtctcctggaacagtggagcccttacatcaggtgttcacactttccctgccgtcttgcaaagtagcggactgtacagccttagttccgttgttacggttccttctagcaacttcggtacacagacatatacttgtaacgtagatcataagcctagcaacaccaaggtggacaaaaccgtagagagaaagtgtggtacccagagttttgggttgttggaccctaaattgtgctatctgttggacggaatcctgttcatttacggagtgatcctgaccgcattgttcctgcgggttaagttttccagatccgcagacgcacccgcttaccaacaagggcagaaccaactctacaatgaacttaatttggggcggagggaagagtacgacgttctggacaaaaggaggggacgagatcccgagatgggcggaaagcctcagcgaaggaagaatccgcaagaggggctttataacgaactccagaaagataaaatggcagaagcctatagtgagattgggatgaagggagaaaggaggaggggtaaaggtcacgatgggttgtaccaaggattgagcacagccactaaagatacctatgatgcgctccacatgcaggccctgccgccaagacgcgccaagagaagcggatctggcgtgaagcagaccctgaatttcgacctgctgaagctggctggcgacgtggaatccaacccaggcccttctagaggccatatgaccgagtacaagcccacggtgcgcctcgccacccgcgacgacgtccccagggccgtacgcaccctcgccgccgcgttcgccgactaccccgccacgcgccacaccgtcgatccggaccgccacatcgagcgggtcaccgagctgcaagaactcttcctcacgcgcgtcgggctcgacatcggcaaggtgtgggtcgcggacgacggcgccgcggtggcggtctggaccacgccggagagcgtcgaagcgggggcggtgttcgccgagatcggcccgcgcatggccgagttgagcggttcccggctggccgcgcagcaacagatggaaggcctcctggcgccgcaccggcccaaggagcccgcgtggttcctggccaccgtcggcgtctcgcccgaccaccagggcaagggtctgggcagcgccgtcgtgctccccggagtggaggcggccgagcgcgccggggtgcccgccttcctggagacctccgcgccccgcaacctccccttctacgagcggctcggcttcaccgtcaccgccgacgtcgaggtgcccgaaggaccgcgcacctggtgcatgacccgcaagcccggtgcctgagtcgac

SEQ ID NO: 9360 - DNA, 3270 bp, Artificial Sequence
  Synthetic Polynucleotide
atggccttaccagtgaccgccttgctcctgccgctggccttgctgctccacgccgccaggccgaatgctggcgtgacccagacacctaagttccaggtgctgaaaaccggccagagcatgaccctgcaatgcgcccaggacatgaaccatgagtacatgagctggtacagacaggaccccggcatgggcctgagactgatccactactctgtggctatccagaccaccgaccagggcgaagtgcccaatggctacaacgtgtccagaagcaccatcgaggacttcccactgagactgctgtctgccgctcctagccagaccagcgtgtacttttgtgccagcagctacctgggcaacaccggcgagctgttttttggcgagggcagcagactgaccgtgctcgagggacagcctaaggccaatcctaccgtgacactgttccctccaagcagcgaagaactccaggccaacaaggccacacttgtgtgcctgatctccgacttctaccctggggctgtgacagtggcttggaaggccgatggatctcctgtgaaagccggcgtggaaaccaccaagccatccaagcagagcaacaacaaatacgccgccagctcctacctgagcctgacacctgagcagtggaagtcccacagatcctacagctgccaagtgacccacgaaggcagcaccgtggaaaagacagtggcccctacagagtgcagcggatcccagagcttcggcctgctggaccccaagctgtgctacctgctggatggcatcctgttcatctacggcgtgatcctgaccgccctgttcctgagagtgaagttcagcagaagcgccgacgcccctgcctaccagcagggacagaaccaactgtacaacgagctgaacctgggcagacgggaagagtacgacgtgctggacaagcggagaggcagggaccctgagatgggcggaaagccccagcggagaaagaacccccaggaaggactgtataacgaactccagaaagacaagatggccgaagcctacagcgagatcggcatgaagggcgagcggagaagaggcaagggccacgatggcctgtaccagggcctgagcaccgccaccaaggacacctatgacgccctgcacatgcaggccctgcctccaagaagggccaagcgatctggatctggagcaacaaacttctcactactcaaacaagcaggtgacgtggaggagaatcccgggcctactagtatggactggatttggcgcatccttttccttgtcggcgctgctaccggcgcgcattccttcgaacaagaagtgacacagatccctgccgctctgtctgtgcctgagggcgaaaacctggtgctgaactgctccttcaccgacagcgccatctacaacctccagtggttcaggcaggaccctggaaagggactgacaagcctgctgctgatccagagcagccagagagagcagacctccggcagactgaatgccagcctggataagagcagcggcaggtctaccctgtatatcgccgcttctcagcctggcgatagcgccacatatctgtgtgctgtgcggcctacaagcggcggcagctacatccctacatttggcagaggcaccagcctgatcgtgcacccttatacgcgtgctccgacaaaggcgccagacgtttttcctattatttcaggatgtcggcatccgaaagataattccccagttgttctggcgtgtcttatcacgggctaccatcctacatctgttaccgttacgtggtatatgggtacgcaaagccaacctcagcggacttttccagagatccaacggcgagattcatattatatgacatccagtcagttgagtacaccgctgcaacagtggcggcaaggtgagtataagtgtgtggtccaacacacagccagtaaaagtaagaaagagatattccggtggcctgaaagcccgaaggcacaagcatcttctgttccgacggcgcaaccgcaagctgaaggaagtcttgcaaaagcaaccacagcacccgcgacaacacgaaacacaggacgcggaggcgaggaaaagaaaaaagaaaaggaaaaggaagagcaagaggagagggaaactaagacccccggtacccagagttttgggttgttggaccctaaattgtgctatctgttggacggaatcctgttcatttacggagtgatcctgaccgcattgttcctgcgggttaagttttccagatccgcagacgcacccgcttaccaacaagggcagaaccaactctacaatgaacttaatttggggcggagggaagagtacgacgttctggacaaaaggaggggacgagatcccgagatgggcggaaagcctcagcgaaggaagaatccgcaagaggggctttataacgaactccagaaagataaaatggcagaagcctatagtgagattgggatgaagggagaaaggaggaggggtaaaggtcacgatgggttgtaccaaggattgagcacagccactaaagatacctatgatgcgctccacatgcaggccctgccgccaagacgcgccaagagaagcggatctggcgtgaagcagaccctgaatttcgacctgctgaagctggctggcgacgtggaatccaacccaggcccttctagaggccatatgaccgagtacaagcccacggtgcgcctcgccacccgcgacgacgtccccagggccgtacgcaccctcgccgccgcgttcgccgactaccccgccacgcgccacaccgtcgatccggaccgccacatcgagcgggtcaccgagctgcaagaactcttcctcacgcgcgtcgggctcgacatcggcaaggtgtgggtcgcggacgacggcgccgcggtggcggtctggaccacgccggagagcgtcgaagcgggggcggtgttcgccgagatcggcccgcgcatggccgagttgagcggttcccggctggccgcgcagcaacagatggaaggcctcctggcgccgcaccggcccaaggagcccgcgtggttcctggccaccgtcggcgtctcgcccgaccaccagggcaagggtctgggcagcgccgtcgtgctccccggagtggaggcggccgagcgcgccggggtgcccgccttcctggagacctccgcgccccgcaacctccccttctacgagcggctcggcttcaccgtcaccgccgacgtcgaggtgcccgaaggaccgcgcacctggtgcatgacccgcaagcccggtgcctga

SEQ ID NO: 9361 - DNA, 3096 bp, Artificial Sequence
  Synthetic Polynucleotide
atggccttaccagtgaccgccttgctcctgccgctggccttgctgctccacgccgccaggccgaatgctggcgtgacccagacacctaagttccaggtgctgaaaaccggccagagcatgaccctgcaatgcgcccaggacatgaaccatgagtacatgagctggtacagacaggaccccggcatgggcctgagactgatccactactctgtggctatccagaccaccgaccagggcgaagtgcccaatggctacaacgtgtccagaagcaccatcgaggacttcccactgagactgctgtctgccgctcctagccagaccagcgtgtacttttgtgccagcagctacctgggcaacaccggcgagctgttttttggcgagggcagcagactgaccgtgctcgagggacagcctaaggccaatcctaccgtgacactgttccctccaagcagcgaagaactccaggccaacaaggccacacttgtgtgcctgatctccgacttctaccctggggctgtgacagtggcttggaaggccgatggatctcctgtgaaagccggcgtggaaaccaccaagccatccaagcagagcaacaacaaatacgccgccagctcctacctgagcctgacacctgagcagtggaagtcccacagatcctacagctgccaagtgacccacgaaggcagcaccgtggaaaagacagtggcccctacagagtgcagcggatcccagagcttcggcctgctggaccccaagctgtgctacctgctggatggcatcctgttcatctacggcgtgatcctgaccgccctgttcctgagagtgaagttcagcagaagcgccgacgcccctgcctaccagcagggacagaaccaactgtacaacgagctgaacctgggcagacgggaagagtacgacgtgctggacaagcggagaggcagggaccctgagatgggcggaaagccccagcggagaaagaacccccaggaaggactgtataacgaactccagaaagacaagatggccgaagcctacagcgagatcggcatgaagggcgagcggagaagaggcaagggccacgatggcctgtaccagggcctgagcaccgccaccaaggacacctatgacgccctgcacatgcaggccctgcctccaagaagggccaagcgatctggatctggagcaacaaacttctcactactcaaacaagcaggtgacgtggaggagaatcccgggcctactagtatggactggatttggcgcatccttttccttgtcggcgctgctaccggcgcgcattccttcgaacaagaagtgacacagatccctgccgctctgtctgtgcctgagggcgaaaacctggtgctgaactgctccttcaccgacagcgccatctacaacctccagtggttcaggcaggaccctggaaagggactgacaagcctgctgctgatccagagcagccagagagagcagacctccggcagactgaatgccagcctggataagagcagcggcaggtctaccctgtatatcgccgcttctcagcctggcgatagcgccacatatctgtgtgctgtgcggcctacaagcggcggcagctacatccctacatttggcagaggcaccagcctgatcgtgcacccttatacgcgtgcctcaacgaaagggcctagcgtcttccccctggcgccgtgctcacgatccacaagcgaatccaccgccgctctcggatgcctcgtaaaggattatttccctgaaccagtcacggtgtcatggaacagcggtgcccttaccagcggcgtccatacctttcctgctgtgctccagtccagcggactttatagtctcagctctgtcgtgaccgtcccttcctctaattttggcacccagacttacacgtgcaacgtcgatcataagcccagtaacaccaaggtagacaagacggtggaacgaaagggtacccagagttttgggttgttggaccctaaattgtgctatctgttggacggaatcctgttcatttacggagtgatcctgaccgcattgttcctgcgggttaagttttccagatccgcagacgcacccgcttaccaacaagggcagaaccaactctacaatgaacttaatttggggcggagggaagagtacgacgttctggacaaaaggaggggacgagatcccgagatgggcggaaagcctcagcgaaggaagaatccgcaagaggggctttataacgaactccagaaagataaaatggcagaagcctatagtgagattgggatgaagggagaaaggaggaggggtaaaggtcacgatgggttgtaccaaggattgagcacagccactaaagatacctatgatgcgctccacatgcaggccctgccgccaagacgcgccaagagaagcggatctggcgtgaagcagaccctgaatttcgacctgctgaagctggctggcgacgtggaatccaacccaggcccttctagaggccatatgaccgagtacaagcccacggtgcgcctcgccacccgcgacgacgtccccagggccgtacgcaccctcgccgccgcgttcgccgactaccccgccacgcgccacaccgtcgatccggaccgccacatcgagcgggtcaccgagctgcaagaactcttcctcacgcgcgtcgggctcgacatcggcaaggtgtgggtcgcggacgacggcgccgcggtggcggtctggaccacgccggagagcgtcgaagcgggggcggtgttcgccgagatcggcccgcgcatggccgagttgagcggttcccggctggccgcgcagcaacagatggaaggcctcctggcgccgcaccggcccaaggagcccgcgtggttcctggccaccgtcggcgtctcgcccgaccaccagggcaagggtctgggcagcgccgtcgtgctccccggagtggaggcggccgagcgcgccggggtgcccgccttcctggagacctccgcgccccgcaacctccccttctacgagcggctcggcttcaccgtcaccgccgacgtcgaggtgcccgaaggaccgcgcacctggtgcatgacccgcaagcccggtgcctga

SEQ ID NO: 9362 - DNA, 3123 bp, Artificial Sequence
  Synthetic Polynucleotide
atggccttaccagtgaccgccttgctcctgccgctggccttgctgctccacgccgccaggccgaatgctggcgtgacccagacacctaagttccaggtgctgaaaaccggccagagcatgaccctgcaatgcgcccaggacatgaaccatgagtacatgagctggtacagacaggaccccggcatgggcctgagactgatccactactctgtggctatccagaccaccgaccagggcgaagtgcccaatggctacaacgtgtccagaagcaccatcgaggacttcccactgagactgctgtctgccgctcctagccagaccagcgtgtacttttgtgccagcagctacctgggcaacaccggcgagctgttttttggcgagggcagcagactgaccgtgctcgagggacagcctaaggccaatcctaccgtgacactgttccctccaagcagcgaagaactccaggccaacaaggccacacttgtgtgcctgatctccgacttctaccctggggctgtgacagtggcttggaaggccgatggatctcctgtgaaagccggcgtggaaaccaccaagccatccaagcagagcaacaacaaatacgccgccagctcctacctgagcctgacacctgagcagtggaagtcccacagatcctacagctgccaagtgacccacgaaggcagcaccgtggaaaagacagtggcccctacagagtgcagcggatcccagagcttcggcctgctggaccccaagctgtgctacctgctggatggcatcctgttcatctacggcgtgatcctgaccgccctgttcctgagagtgaagttcagcagaagcgccgacgcccctgcctaccagcagggacagaaccaactgtacaacgagctgaacctgggcagacgggaagagtacgacgtgctggacaagcggagaggcagggaccctgagatgggcggaaagccccagcggagaaagaacccccaggaaggactgtataacgaactccagaaagacaagatggccgaagcctacagcgagatcggcatgaagggcgagcggagaagaggcaagggccacgatggcctgtaccagggcctgagcaccgccaccaaggacacctatgacgccctgcacatgcaggccctgcctccaagaagggccaagcgatctggatctggagcaacaaacttctcactactcaaacaagcaggtgacgtggaggagaatcccgggcctactagtatggactggatttggcgcatccttttccttgtcggcgctgctaccggcgcgcattccttcgaacaagaagtgacacagatccctgccgctctgtctgtgcctgagggcgaaaacctggtgctgaactgctccttcaccgacagcgccatctacaacctccagtggttcaggcaggaccctggaaagggactgacaagcctgctgctgatccagagcagccagagagagcagacctccggcagactgaatgccagcctggataagagcagcggcaggtctaccctgtatatcgccgcttctcagcctggcgatagcgccacatatctgtgtgctgtgcggcctacaagcggcggcagctacatccctacatttggcagaggcaccagcctgatcgtgcacccttatacgcgtgcgtcacctacgtccccaaaagtgttcccgctgtcactcgattccactccacaggacggtaacgtggtggttgcctgcctggtacaaggtttctttcctcaagaaccactctctgtgacgtggtctgaaagtggtcagaatgttacagcacggaacttcccaccgagtcaagatgcgagtggggatctctatacgacatccagtcaactcacactgcccgcaacacaatgccccgatggcaaatctgttacctgccatgtgaaacattacaccaatccatcccaggatgtgacagtaccttgtccggttccgccccctcccccgggtacccagagttttgggttgttggaccctaaattgtgctatctgttggacggaatcctgttcatttacggagtgatcctgaccgcattgttcctgcgggttaagttttccagatccgcagacgcacccgcttaccaacaagggcagaaccaactctacaatgaacttaatttggggcggagggaagagtacgacgttctggacaaaaggaggggacgagatcccgagatgggcggaaagcctcagcgaaggaagaatccgcaagaggggctttataacgaactccagaaagataaaatggcagaagcctatagtgagattgggatgaagggagaaaggaggaggggtaaaggtcacgatgggttgtaccaaggattgagcacagccactaaagatacctatgatgcgctccacatgcaggccctgccgccaagacgcgccaagagaagcggatctggcgtgaagcagaccctgaatttcgacctgctgaagctggctggcgacgtggaatccaacccaggcccttctagaggccatatgaccgagtacaagcccacggtgcgcctcgccacccgcgacgacgtccccagggccgtacgcaccctcgccgccgcgttcgccgactaccccgccacgcgccacaccgtcgatccggaccgccacatcgagcgggtcaccgagctgcaagaactcttcctcacgcgcgtcgggctcgacatcggcaaggtgtgggtcgcggacgacggcgccgcggtggcggtctggaccacgccggagagcgtcgaagcgggggcggtgttcgccgagatcggcccgcgcatggccgagttgagcggttcccggctggccgcgcagcaacagatggaaggcctcctggcgccgcaccggcccaaggagcccgcgtggttcctggccaccgtcggcgtctcgcccgaccaccagggcaagggtctgggcagcgccgtcgtgctccccggagtggaggcggccgagcgcgccggggtgcccgccttcctggagacctccgcgccccgcaacctccccttctacgagcggctcggcttcaccgtcaccgccgacgtcgaggtgcccgaaggaccgcgcacctggtgcatgacccgcaagcccggtgcctgagtcgac

SEQ ID NO: 9363 - DNA, 3102 bp, Artificial Sequence
  Synthetic Polynucleotide
atggccttaccagtgaccgccttgctcctgccgctggccttgctgctccacgccgccaggccgaatgctggcgtgacccagacacctaagttccaggtgctgaaaaccggccagagcatgaccctgcaatgcgcccaggacatgaaccatgagtacatgagctggtacagacaggaccccggcatgggcctgagactgatccactactctgtggctatccagaccaccgaccagggcgaagtgcccaatggctacaacgtgtccagaagcaccatcgaggacttcccactgagactgctgtctgccgctcctagccagaccagcgtgtacttttgtgccagcagctacctgggcaacaccggcgagctgttttttggcgagggcagcagactgaccgtgctcgagggacagcctaaggccaatcctaccgtgacactgttccctccaagcagcgaagaactccaggccaacaaggccacacttgtgtgcctgatctccgacttctaccctggggctgtgacagtggcttggaaggccgatggatctcctgtgaaagccggcgtggaaaccaccaagccatccaagcagagcaacaacaaatacgccgccagctcctacctgagcctgacacctgagcagtggaagtcccacagatcctacagctgccaagtgacccacgaaggcagcaccgtggaaaagacagtggcccctacagagtgcagcggatcccagagcttcggcctgctggaccccaagctgtgctacctgctggatggcatcctgttcatctacggcgtgatcctgaccgccctgttcctgagagtgaagttcagcagaagcgccgacgcccctgcctaccagcagggacagaaccaactgtacaacgagctgaacctgggcagacgggaagagtacgacgtgctggacaagcggagaggcagggaccctgagatgggcggaaagccccagcggagaaagaacccccaggaaggactgtataacgaactccagaaagacaagatggccgaagcctacagcgagatcggcatgaagggcgagcggagaagaggcaagggccacgatggcctgtaccagggcctgagcaccgccaccaaggacacctatgacgccctgcacatgcaggccctgcctccaagaagggccaagcgatctggatctggagcaacaaacttctcactactcaaacaagcaggtgacgtggaggagaatcccgggcctactagtatggactggatttggcgcatccttttccttgtcggcgctgctaccggcgcgcattccttcgaacaagaagtgacacagatccctgccgctctgtctgtgcctgagggcgaaaacctggtgctgaactgctccttcaccgacagcgccatctacaacctccagtggttcaggcaggaccctggaaagggactgacaagcctgctgctgatccagagcagccagagagagcagacctccggcagactgaatgccagcctggataagagcagcggcaggtctaccctgtatatcgccgcttctcagcctggcgatagcgccacatatctgtgtgctgtgcggcctacaagcggcggcagctacatccctacatttggcagaggcaccagcctgatcgtgcacccttatacgcgtgctagtacccagtcaccttctgttttcccgcttactagatgctgcaagaacataccatccaatgccacttctgtcacactgggctgtcttgctacaggttattttcctgagccggtgatggtcacttgggataccggtagcctgaatggaactacaatgacgctgcctgccacgacgctcacattgagtgggcattacgcgacaattagtcttttgacggtaagcggagcttgggctaagcagatgttcacttgcagagtagcgcacactccctctagtactgactgggttgacaacaaaaccttttctggtacccagagttttgggttgttggaccctaaattgtgctatctgttggacggaatcctgttcatttacggagtgatcctgaccgcattgttcctgcgggttaagttttccagatccgcagacgcacccgcttaccaacaagggcagaaccaactctacaatgaacttaatttggggcggagggaagagtacgacgttctggacaaaaggaggggacgagatcccgagatgggcggaaagcctcagcgaaggaagaatccgcaagaggggctttataacgaactccagaaagataaaatggcagaagcctatagtgagattgggatgaagggagaaaggaggaggggtaaaggtcacgatgggttgtaccaaggattgagcacagccactaaagatacctatgatgcgctccacatgcaggccctgccgccaagacgcgccaagagaagcggatctggcgtgaagcagaccctgaatttcgacctgctgaagctggctggcgacgtggaatccaacccaggcccttctagaggccatatgaccgagtacaagcccacggtgcgcctcgccacccgcgacgacgtccccagggccgtacgcaccctcgccgccgcgttcgccgactaccccgccacgcgccacaccgtcgatccggaccgccacatcgagcgggtcaccgagctgcaagaactcttcctcacgcgcgtcgggctcgacatcggcaaggtgtgggtcgcggacgacggcgccgcggtggcggtctggaccacgccggagagcgtcgaagcgggggcggtgttcgccgagatcggcccgcgcatggccgagttgagcggttcccggctggccgcgcagcaacagatggaaggcctcctggcgccgcaccggcccaaggagcccgcgtggttcctggccaccgtcggcgtctcgcccgaccaccagggcaagggtctgggcagcgccgtcgtgctccccggagtggaggcggccgagcgcgccggggtgcccgccttcctggagacctccgcgccccgcaacctccccttctacgagcggctcggcttcaccgtcaccgccgacgtcgaggtgcccgaaggaccgcgcacctggtgcatgacccgcaagcccggtgcctga

SEQ ID NO: 9364 - DNA, 3102 bp, Artificial Sequence
  Synthetic Polynucleotide
atggccttaccagtgaccgccttgctcctgccgctggccttgctgctccacgccgccaggccgaatgctggcgtgacccagacacctaagttccaggtgctgaaaaccggccagagcatgaccctgcaatgcgcccaggacatgaaccatgagtacatgagctggtacagacaggaccccggcatgggcctgagactgatccactactctgtggctatccagaccaccgaccagggcgaagtgcccaatggctacaacgtgtccagaagcaccatcgaggacttcccactgagactgctgtctgccgctcctagccagaccagcgtgtacttttgtgccagcagctacctgggcaacaccggcgagctgttttttggcgagggcagcagactgaccgtgctcgagggacagcctaaggccaatcctaccgtgacactgttccctccaagcagcgaagaactccaggccaacaaggccacacttgtgtgcctgatctccgacttctaccctggggctgtgacagtggcttggaaggccgatggatctcctgtgaaagccggcgtggaaaccaccaagccatccaagcagagcaacaacaaatacgccgccagctcctacctgagcctgacacctgagcagtggaagtcccacagatcctacagctgccaagtgacccacgaaggcagcaccgtggaaaagacagtggcccctacagagtgcagcggatcccagagcttcggcctgctggaccccaagctgtgctacctgctggatggcatcctgttcatctacggcgtgatcctgaccgccctgttcctgagagtgaagttcagcagaagcgccgacgcccctgcctaccagcagggacagaaccaactgtacaacgagctgaacctgggcagacgggaagagtacgacgtgctggacaagcggagaggcagggaccctgagatgggcggaaagccccagcggagaaagaacccccaggaaggactgtataacgaactccagaaagacaagatggccgaagcctacagcgagatcggcatgaagggcgagcggagaagaggcaagggccacgatggcctgtaccagggcctgagcaccgccaccaaggacacctatgacgccctgcacatgcaggccctgcctccaagaagggccaagcgatctggatctggagcaacaaacttctcactactcaaacaagcaggtgacgtggaggagaatcccgggcctactagtatggactggatttggcgcatccttttccttgtcggcgctgctaccggcgcgcattccttcgaacaagaagtgacacagatccctgccgctctgtctgtgcctgagggcgaaaacctggtgctgaactgctccttcaccgacagcgccatctacaacctccagtggttcaggcaggaccctggaaagggactgacaagcctgctgctgatccagagcagccagagagagcagacctccggcagactgaatgccagcctggataagagcagcggcaggtctaccctgtatatcgccgcttctcagcctggcgatagcgccacatatctgtgtgctgtgcggcctacaagcggcggcagctacatccctacatttggcagaggcaccagcctgatcgtgcacccttatacgcgtgcgtccactaagggtccgtcagtcttcccgctggcgccctgttcccgcagcacgagtgaatctaccgccgcccttgggtgcttggtaaaagactattttcctgagcccgttacagtatcatggaacagcggggctctgactagcggggtgcatacgttccctgcggttctgcaatctagcggactgtattctctctccagtgttgtgaccgtgccaagctccagcctcggtactaaaacttatacatgtaatgtggatcataaaccttcaaataccaaggttgacaaaagggtagagagtaagtacggtggtacccagagttttgggttgttggaccctaaattgtgctatctgttggacggaatcctgttcatttacggagtgatcctgaccgcattgttcctgcgggttaagttttccagatccgcagacgcacccgcttaccaacaagggcagaaccaactctacaatgaacttaatttggggcggagggaagagtacgacgttctggacaaaaggaggggacgagatcccgagatgggcggaaagcctcagcgaaggaagaatccgcaagaggggctttataacgaactccagaaagataaaatggcagaagcctatagtgagattgggatgaagggagaaaggaggaggggtaaaggtcacgatgggttgtaccaaggattgagcacagccactaaagatacctatgatgcgctccacatgcaggccctgccgccaagacgcgccaagagaagcggatctggcgtgaagcagaccctgaatttcgacctgctgaagctggctggcgacgtggaatccaacccaggcccttctagaggccatatgaccgagtacaagcccacggtgcgcctcgccacccgcgacgacgtccccagggccgtacgcaccctcgccgccgcgttcgccgactaccccgccacgcgccacaccgtcgatccggaccgccacatcgagcgggtcaccgagctgcaagaactcttcctcacgcgcgtcgggctcgacatcggcaaggtgtgggtcgcggacgacggcgccgcggtggcggtctggaccacgccggagagcgtcgaagcgggggcggtgttcgccgagatcggcccgcgcatggccgagttgagcggttcccggctggccgcgcagcaacagatggaaggcctcctggcgccgcaccggcccaaggagcccgcgtggttcctggccaccgtcggcgtctcgcccgaccaccagggcaagggtctgggcagcgccgtcgtgctccccggagtggaggcggccgagcgcgccggggtgcccgccttcctggagacctccgcgccccgcaacctccccttctacgagcggctcggcttcaccgtcaccgccgacgtcgaggtgcccgaaggaccgcgcacctggtgcatgacccgcaagcccggtgcctga

SEQ ID NO: 9365 - DNA, 3102 bp, Artificial Sequence
  Synthetic Polynucleotide
atggccttaccagtgaccgccttgctcctgccgctggccttgctgctccacgccgccaggccgaatgctggcgtgacccagacacctaagttccaggtgctgaaaaccggccagagcatgaccctgcaatgcgcccaggacatgaaccatgagtacatgagctggtacagacaggaccccggcatgggcctgagactgatccactactctgtggctatccagaccaccgaccagggcgaagtgcccaatggctacaacgtgtccagaagcaccatcgaggacttcccactgagactgctgtctgccgctcctagccagaccagcgtgtacttttgtgccagcagctacctgggcaacaccggcgagctgttttttggcgagggcagcagactgaccgtgctcgagggacagcctaaggccaatcctaccgtgacactgttccctccaagcagcgaagaactccaggccaacaaggccacacttgtgtgcctgatctccgacttctaccctggggctgtgacagtggcttggaaggccgatggatctcctgtgaaagccggcgtggaaaccaccaagccatccaagcagagcaacaacaaatacgccgccagctcctacctgagcctgacacctgagcagtggaagtcccacagatcctacagctgccaagtgacccacgaaggcagcaccgtggaaaagacagtggcccctacagagtgcagcggatcccagagcttcggcctgctggaccccaagctgtgctacctgctggatggcatcctgttcatctacggcgtgatcctgaccgccctgttcctgagagtgaagttcagcagaagcgccgacgcccctgcctaccagcagggacagaaccaactgtacaacgagctgaacctgggcagacgggaagagtacgacgtgctggacaagcggagaggcagggaccctgagatgggcggaaagccccagcggagaaagaacccccaggaaggactgtataacgaactccagaaagacaagatggccgaagcctacagcgagatcggcatgaagggcgagcggagaagaggcaagggccacgatggcctgtaccagggcctgagcaccgccaccaaggacacctatgacgccctgcacatgcaggccctgcctccaagaagggccaagcgatctggatctggagcaacaaacttctcactactcaaacaagcaggtgacgtggaggagaatcccgggcctactagtatggactggatttggcgcatccttttccttgtcggcgctgctaccggcgcgcattccttcgaacaagaagtgacacagatccctgccgctctgtctgtgcctgagggcgaaaacctggtgctgaactgctccttcaccgacagcgccatctacaacctccagtggttcaggcaggaccctggaaagggactgacaagcctgctgctgatccagagcagccagagagagcagacctccggcagactgaatgccagcctggataagagcagcggcaggtctaccctgtatatcgccgcttctcagcctggcgatagcgccacatatctgtgtgctgtgcggcctacaagcggcggcagctacatccctacatttggcagaggcaccagcctgatcgtgcacccttatacgcgtgcaagtacaaagggacccagtgttttcccgctcgccccctgttcacgatcaacgagtgagtccactgcggctctcggatgcctcgtcaaagactacttccccgagccggtgactgttagttggaactctggggctcttacttcaggcgtacacacattccccgccgtgcttcagtcaagtgggctctactcacttagcagtgtggtaacggttccctctagcaactttggcacccaaacatatacttgcaacgtcgatcacaagccgtcaaataccaaagttgacaagaccgttgaaaggaaatgttgtggtacccagagttttgggttgttggaccctaaattgtgctatctgttggacggaatcctgttcatttacggagtgatcctgaccgcattgttcctgcgggttaagttttccagatccgcagacgcacccgcttaccaacaagggcagaaccaactctacaatgaacttaatttggggcggagggaagagtacgacgttctggacaaaaggaggggacgagatcccgagatgggcggaaagcctcagcgaaggaagaatccgcaagaggggctttataacgaactccagaaagataaaatggcagaagcctatagtgagattgggatgaagggagaaaggaggaggggtaaaggtcacgatgggttgtaccaaggattgagcacagccactaaagatacctatgatgcgctccacatgcaggccctgccgccaagacgcgccaagagaagcggatctggcgtgaagcagaccctgaatttcgacctgctgaagctggctggcgacgtggaatccaacccaggcccttctagaggccatatgaccgagtacaagcccacggtgcgcctcgccacccgcgacgacgtccccagggccgtacgcaccctcgccgccgcgttcgccgactaccccgccacgcgccacaccgtcgatccggaccgccacatcgagcgggtcaccgagctgcaagaactcttcctcacgcgcgtcgggctcgacatcggcaaggtgtgggtcgcggacgacggcgccgcggtggcggtctggaccacgccggagagcgtcgaagcgggggcggtgttcgccgagatcggcccgcgcatggccgagttgagcggttcccggctggccgcgcagcaacagatggaaggcctcctggcgccgcaccggcccaaggagcccgcgtggttcctggccaccgtcggcgtctcgcccgaccaccagggcaagggtctgggcagcgccgtcgtgctccccggagtggaggcggccgagcgcgccggggtgcccgccttcctggagacctccgcgccccgcaacctccccttctacgagcggctcggcttcaccgtcaccgccgacgtcgaggtgcccgaaggaccgcgcacctggtgcatgacccgcaagcccggtgcctga

SEQ ID NO: 9366 - DNA, 3147 bp, Artificial Sequence
  Synthetic Polynucleotide
atggccttaccagtgaccgccttgctcctgccgctggccttgctgctccacgccgccaggccgaatgctggcgtgacccagacacctaagttccaggtgctgaaaaccggccagagcatgaccctgcaatgcgcccaggacatgaaccatgagtacatgagctggtacagacaggaccccggcatgggcctgagactgatccactactctgtggctatccagaccaccgaccagggcgaagtgcccaatggctacaacgtgtccagaagcaccatcgaggacttcccactgagactgctgtctgccgctcctagccagaccagcgtgtacttttgtgccagcagctacctgggcaacaccggcgagctgttttttggcgagggcagcagactgaccgtgctcgaggacctgaagaacgtgttcccacctgaggtggccgtgttcgagcctagcgaggccgagatcagccacacccagaaagccaccctcgtgtgcctggctaccggcttctaccccgaccatgtggaactgtcttggtgggtcaacggcaaagaggtgcacagcggcgtgtctaccgacccccagccactgaaagaacagcccgccctgaacgacagccggtactgcctgagcagcagactgagagtgtccgccaccttctggcagaacccccggaaccacttcagatgccaggtgcagttctacggcctgagcgagaacgacgagtggacccaggacagagccaagcccgtgacccagatcgtgtctgccgaagcctggggcagagccgattgcggatcccagagcttcggcctgctggaccccaagctgtgctacctgctggatggcatcctgttcatctacggcgtgatcctgaccgccctgttcctgagagtgaagttcagcagaagcgccgacgcccctgcctaccagcagggacagaaccaactgtacaacgagctgaacctgggcagacgggaagagtacgacgtgctggacaagcggagaggcagggaccctgagatgggcggaaagccccagcggagaaagaacccccaggaaggactgtataacgaactccagaaagacaagatggccgaagcctacagcgagatcggcatgaagggcgagcggagaagaggcaagggccacgatggcctgtaccagggcctgagcaccgccaccaaggacacctatgacgccctgcacatgcaggccctgcctccaagaagggccaagcgatctggatctggagcaacaaacttctcactactcaaacaagcaggtgacgtggaggagaatcccgggcctactagtatggactggatttggcgcatccttttccttgtcggcgctgctaccggcgcgcattccttcgaacaagaagtgacacagatccctgccgctctgtctgtgcctgagggcgaaaacctggtgctgaactgctccttcaccgacagcgccatctacaacctccagtggttcaggcaggaccctggaaagggactgacaagcctgctgctgatccagagcagccagagagagcagacctccggcagactgaatgccagcctggataagagcagcggcaggtctaccctgtatatcgccgcttctcagcctggcgatagcgccacatatctgtgtgctgtgcggcctacaagcggcggcagctacatccctacatttggcagaggcaccagcctgatcgtgcacccttatacgcgtatccagaaccctgatcctgccgtgtaccagctgcgggatagcaagagcagcgacaagagcgtgtgtctgttcaccgacttcgacagccagaccaacgtgtcccagagcaaggactccgacgtgtacatcaccgataagaccgtgctggacatgcggagcatggacttcaagagcaactccgccgtggcctggtccaacaagtccgatttcgcctgcgccaacgccttcaacaacagcattatccccgaggacacattcttcccaagccccgagagcagctgcggtacccagagttttgggttgttggaccctaaattgtgctatctgttggacggaatcctgttcatttacggagtgatcctgaccgcattgttcctgcgggttaagttttccagatccgcagacgcacccgcttaccaacaagggcagaaccaactctacaatgaacttaatttggggcggagggaagagtacgacgttctggacaaaaggaggggacgagatcccgagatgggcggaaagcctcagcgaaggaagaatccgcaagaggggctttataacgaactccagaaagataaaatggcagaagcctatagtgagattgggatgaagggagaaaggaggaggggtaaaggtcacgatgggttgtaccaaggattgagcacagccactaaagatacctatgatgcgctccacatgcaggccctgccgccaagacgcgccaagagaagcggatctggcgtgaagcagaccctgaatttcgacctgctgaagctggctggcgacgtggaatccaacccaggcccttctagaggccatatgaccgagtacaagcccacggtgcgcctcgccacccgcgacgacgtccccagggccgtacgcaccctcgccgccgcgttcgccgactaccccgccacgcgccacaccgtcgatccggaccgccacatcgagcgggtcaccgagctgcaagaactcttcctcacgcgcgtcgggctcgacatcggcaaggtgtgggtcgcggacgacggcgccgcggtggcggtctggaccacgccggagagcgtcgaagcgggggcggtgttcgccgagatcggcccgcgcatggccgagttgagcggttcccggctggccgcgcagcaacagatggaaggcctcctggcgccgcaccggcccaaggagcccgcgtggttcctggccaccgtcggcgtctcgcccgaccaccagggcaagggtctgggcagcgccgtcgtgctccccggagtggaggcggccgagcgcgccggggtgcccgccttcctggagacctccgcgccccgcaacctccccttctacgagcggctcggcttcaccgtcaccgccgacgtcgaggtgcccgaaggaccgcgcacctggtgcatgacccgcaagcccggtgcctga

SEQ ID NO: 9367 - DNA, 3147 bp, Artificial Sequence
  Synthetic Polynucleotide
atggccttaccagtgaccgccttgctcctgccgctggccttgctgctccacgccgccaggccgaatgctggcgtgacccagacacctaagttccaggtgctgaaaaccggccagagcatgaccctgcaatgcgcccaggacatgaaccatgagtacatgagctggtacagacaggaccccggcatgggcctgagactgatccactactctgtggctatccagaccaccgaccagggcgaagtgcccaatggctacaacgtgtccagaagcaccatcgaggacttcccactgagactgctgtctgccgctcctagccagaccagcgtgtacttttgtgccagcagctacctgggcaacaccggcgagctgttttttggcgagggcagcagactgaccgtgctcgaggacctgaagaacgtgttcccacctgaggtggccgtgttcgagcctagcaaggccgagatcgcccacacccagaaagccaccctcgtgtgcctggctaccggcttctaccccgaccatgtggaactgtcttggtgggtcaacggcaaagaggtgcacagcggcgtgtgtaccgacccccagccactgaaagaacagcccgccctgaacgacagccggtactgcctgagcagcagactgagagtgtccgccaccttctggcagaacccccggaaccacttcagatgccaggtgcagttctacggcctgagcgagaacgacgagtggacccaggacagagccaagcccgtgacccagatcgtgtctgccgaagcctggggcagagccgattgcggatcccagagcttcggcctgctggaccccaagctgtgctacctgctggatggcatcctgttcatctacggcgtgatcctgaccgccctgttcctgagagtgaagttcagcagaagcgccgacgcccctgcctaccagcagggacagaaccaactgtacaacgagctgaacctgggcagacgggaagagtacgacgtgctggacaagcggagaggcagggaccctgagatgggcggaaagccccagcggagaaagaacccccaggaaggactgtataacgaactccagaaagacaagatggccgaagcctacagcgagatcggcatgaagggcgagcggagaagaggcaagggccacgatggcctgtaccagggcctgagcaccgccaccaaggacacctatgacgccctgcacatgcaggccctgcctccaagaagggccaagcgatctggatctggagcaacaaacttctcactactcaaacaagcaggtgacgtggaggagaatcccgggcctactagtatggactggatttggcgcatccttttccttgtcggcgctgctaccggcgcgcattccttcgaacaagaagtgacacagatccctgccgctctgtctgtgcctgagggcgaaaacctggtgctgaactgctccttcaccgacagcgccatctacaacctccagtggttcaggcaggaccctggaaagggactgacaagcctgctgctgatccagagcagccagagagagcagacctccggcagactgaatgccagcctggataagagcagcggcaggtctaccctgtatatcgccgcttctcagcctggcgatagcgccacatatctgtgtgctgtgcggcctacaagcggcggcagctacatccctacatttggcagaggcaccagcctgatcgtgcacccttatacgcgtatccagaaccctgatcctgccgtgtaccagctgcgggatagcaagagcagcgacaagagcgtgtgtctgttcaccgacttcgacagccagaccaacgtgtcccagagcaaggactccgacgtgtacatcaccgataagtgcgtgctggacatgcggagcatggacttcaagagcaactccgccgtggcctggtccaacaagtccgatttcgcctgcgccaacgccttcaacaacagcattatccccgaggacacattcttcccaagcagcgacgtgccctgcggtacccagagttttgggttgttggaccctaaattgtgctatctgttggacggaatcctgttcatttacggagtgatcctgaccgcattgttcctgcgggttaagttttccagatccgcagacgcacccgcttaccaacaagggcagaaccaactctacaatgaacttaatttggggcggagggaagagtacgacgttctggacaaaaggaggggacgagatcccgagatgggcggaaagcctcagcgaaggaagaatccgcaagaggggctttataacgaactccagaaagataaaatggcagaagcctatagtgagattgggatgaagggagaaaggaggaggggtaaaggtcacgatgggttgtaccaaggattgagcacagccactaaagatacctatgatgcgctccacatgcaggccctgccgccaagacgcgccaagagaagcggatctggcgtgaagcagaccctgaatttcgacctgctgaagctggctggcgacgtggaatccaacccaggcccttctagaggccatatgaccgagtacaagcccacggtgcgcctcgccacccgcgacgacgtccccagggccgtacgcaccctcgccgccgcgttcgccgactaccccgccacgcgccacaccgtcgatccggaccgccacatcgagcgggtcaccgagctgcaagaactcttcctcacgcgcgtcgggctcgacatcggcaaggtgtgggtcgcggacgacggcgccgcggtggcggtctggaccacgccggagagcgtcgaagcgggggcggtgttcgccgagatcggcccgcgcatggccgagttgagcggttcccggctggccgcgcagcaacagatggaaggcctcctggcgccgcaccggcccaaggagcccgcgtggttcctggccaccgtcggcgtctcgcccgaccaccagggcaagggtctgggcagcgccgtcgtgctccccggagtggaggcggccgagcgcgccggggtgcccgccttcctggagacctccgcgccccgcaacctccccttctacgagcggctcggcttcaccgtcaccgccgacgtcgaggtgcccgaaggaccgcgcacctggtgcatgacccgcaagcccggtgcctga

SEQ ID NO: 9368 - DNA, 2445 bp, Artificial Sequence
  Synthetic Polynucleotide
atggccttaccagtgaccgccttgctcctgccgctggccttgctgctccacgccgccaggccgaatgctggcgtgacccagacacctaagttccaggtgctgaaaaccggccagagcatgaccctgcaatgcgcccaggacatgaaccatgagtacatgagctggtacagacaggaccccggcatgggcctgagactgatccactactctgtggctatccagaccaccgaccagggcgaagtgcccaatggctacaacgtgtccagaagcaccatcgaggacttcccactgagactgctgtctgccgctcctagccagaccagcgtgtacttttgtgccagcagctacctgggcaacaccggcgagctgttttttggcgagggcagcagactgaccgtgctcgaggacctgaagaacgtgttcccacctgaggtggccgtgttcgagcctagcgaggccgagatcagccacacccagaaagccaccctcgtgtgcctggctaccggcttctaccccgaccatgtggaactgtcttggtgggtcaacggcaaagaggtgcacagcggcgtgtgtaccgacccccagccactgaaagaacagcccgccctgaacgacagccggtactgcctgagcagcagactgagagtgtccgccaccttctggcagaacccccggaaccacttcagatgccaggtgcagttctacggcctgagcgagaacgacgagtggacccaggacagagccaagcccgtgacccagatcgtgtctgccgaagcctggggcagagccgattgcggatcccagagcttcggcctgctggaccccaagctgtgctacctgctggatggcatcctgttcatctacggcgtgatcctgaccgccctgttcctgagagtgaagttcagcagaagcgccgacgcccctgcctaccagcagggacagaaccaactgtacaacgagctgaacctgggcagacgggaagagtacgacgtgctggacaagcggagaggcagggaccctgagatgggcggaaagccccagcggagaaagaacccccaggaaggactgtataacgaactccagaaagacaagatggccgaagcctacagcgagatcggcatgaagggcgagcggagaagaggcaagggccacgatggcctgtaccagggcctgagcaccgccaccaaggacacctatgacgccctgcacatgcaggccctgcctccaagaagggccaagcgatctggatctggagcaacaaacttctcactactcaaacaagcaggtgacgtggaggagaatcccgggcctactagtatggactggatttggcgcatccttttccttgtcggcgctgctaccggcgcgcattccttcgaacaagaagtgacacagatccctgccgctctgtctgtgcctgagggcgaaaacctggtgctgaactgctccttcaccgacagcgccatctacaacctccagtggttcaggcaggaccctggaaagggactgacaagcctgctgctgatccagagcagccagagagagcagacctccggcagactgaatgccagcctggataagagcagcggcaggtctaccctgtatatcgccgcttctcagcctggcgatagcgccacatatctgtgtgctgtgcggcctacaagcggcggcagctacatccctacatttggcagaggcaccagcctgatcgtgcacccttatacgcgtatccagaaccctgatcctgccgtgtaccagctgcgggatagcaagagcagcgacaagagcgtgtgtctgttcaccgacttcgacagccagaccaacgtgtcccagagcaaggactccgacgtgtacatcaccgataagtgcgtgctggacatgcggagcatggacttcaagagcaactccgccgtggcctggtccaacaagtccgatttcgcctgcgccaacgccttcaacaacagcattatccccgaggacacattcttcccaagccccgagagcagctgcggtacccagagttttgggttgttggaccctaaattgtgctatctgttggacggaatcctgttcatttacggagtgatcctgaccgcattgttcctgcgggttaagttttccagatccgcagacgcacccgcttaccaacaagggcagaaccaactctacaatgaacttaatttggggcggagggaagagtacgacgttctggacaaaaggaggggacgagatcccgagatgggcggaaagcctcagcgaaggaagaatccgcaagaggggctttataacgaactccagaaagataaaatggcagaagcctatagtgagattgggatgaagggagaaaggaggaggggtaaaggtcacgatgggttgtaccaaggattgagcacagccactaaagatacctatgatgcgctccacatgcaggccctgccgccaaga

SEQ ID NO: 9369 - DNA, 2463 bp, Artificial Sequence
  Synthetic Polynucleotide
atggccttaccagtgaccgccttgctcctgccgctggccttgctgctccacgccgccaggccgaatgctggcgtgacccagacacctaagttccaggtgctgaaaaccggccagagcatgaccctgcaatgcgcccaggacatgaaccatgagtacatgagctggtacagacaggaccccggcatgggcctgagactgatccactactctgtggctatccagaccaccgaccagggcgaagtgcccaatggctacaacgtgtccagaagcaccatcgaggacttcccactgagactgctgtctgccgctcctagccagaccagcgtgtacttttgtgccagcagctacctgggcaacaccggcgagctgttttttggcgagggcagcagactgaccgtgctcgagcagagcttcggcctgctggaccccaagctgtgctacctgctggatggcatcctgttcatctacggcgtgatcctgaccgccctgttcctgagagtgaagttcagcagaagcgccgacgcccctgcctaccagcagggacagaaccaactgtacaacgagctgaacctgggcagacgggaagagtacgacgtgctggacaagcggagaggcagggaccctgagatgggcggaaagccccagcggagaaagaacccccaggaaggactgtataacgaactccagaaagacaagatggccgaagcctacagcgagatcggcatgaagggcgagcggagaagaggcaagggccacgatggcctgtaccagggcctgagcaccgccaccaaggacacctatgacgccctgcacatgcaggccctgcctccaagaagggccaagcgatctggatctggagcaacaaacttctcactactcaaacaagcaggtgacgtggaggagaatcccgggcctactagtatggactggatttggcgcatccttttccttgtcggcgctgctaccggcgcgcattccttcgaacaagaagtgacacagatccctgccgctctgtctgtgcctgagggcgaaaacctggtgctgaactgctccttcaccgacagcgccatctacaacctccagtggttcaggcaggaccctggaaagggactgacaagcctgctgctgatccagagcagccagagagagcagacctccggcagactgaatgccagcctggataagagcagcggcaggtctaccctgtatatcgccgcttctcagcctggcgatagcgccacatatctgtgtgctgtgcggcctacaagcggcggcagctacatccctacatttggcagaggcaccagcctgatcgtgcacccttatacgcgtcagagttttgggttgttggaccctaaattgtgctatctgttggacggaatcctgttcatttacggagtgatcctgaccgcattgttcctgcgggttaagttttccagatccgcagacgcacccgcttaccaacaagggcagaaccaactctacaatgaacttaatttggggcggagggaagagtacgacgttctggacaaaaggaggggacgagatcccgagatgggcggaaagcctcagcgaaggaagaatccgcaagaggggctttataacgaactccagaaagataaaatggcagaagcctatagtgagattgggatgaagggagaaaggaggaggggtaaaggtcacgatgggttgtaccaaggattgagcacagccactaaagatacctatgatgcgctccacatgcaggccctgccgccaagacgcgccaagagaagcggatctggcgtgaagcagaccctgaatttcgacctgctgaagctggctggcgacgtggaatccaacccaggcccttctagaggccatatgaccgagtacaagcccacggtgcgcctcgccacccgcgacgacgtccccagggccgtacgcaccctcgccgccgcgttcgccgactaccccgccacgcgccacaccgtcgatccggaccgccacatcgagcgggtcaccgagctgcaagaactcttcctcacgcgcgtcgggctcgacatcggcaaggtgtgggtcgcggacgacggcgccgcggtggcggtctggaccacgccggagagcgtcgaagcgggggcggtgttcgccgagatcggcccgcgcatggccgagttgagcggttcccggctggccgcgcagcaacagatggaaggcctcctggcgccgcaccggcccaaggagcccgcgtggttcctggccaccgtcggcgtctcgcccgaccaccagggcaagggtctgggcagcgccgtcgtgctccccggagtggaggcggccgagcgcgccggggtgcccgccttcctggagacctccgcgccccgcaacctccccttctacgagcggctcggcttcaccgtcaccgccgacgtcgaggtgcccgaaggaccgcgcacctggtgcatgacccgcaagcccggtgcctga

SEQ ID NO: 9370 - DNA, 2568 bp, Artificial Sequence
  Synthetic Polynucleotide
atggccttaccagtgaccgccttgctcctgccgctggccttgctgctccacgccgccaggccgaatgctggcgtgacccagacacctaagttccaggtgctgaaaaccggccagagcatgaccctgcaatgcgcccaggacatgaaccatgagtacatgagctggtacagacaggaccccggcatgggcctgagactgatccactactctgtggctatccagaccaccgaccagggcgaagtgcccaatggctacaacgtgtccagaagcaccatcgaggacttcccactgagactgctgtctgccgctcctagccagaccagcgtgtacttttgtgccagcagctacctgggcaacaccggcgagctgttttttggcgagggcagcagactgaccgtgctcgaggacctgaagaacgtgttcccacctgaggtggccgtgttcgagcctagcgaggccgagatcagccacacccagaaagccaccctcgtgtgcctggctaccggcttctaccccgaccatgtggaactgtcttggtgggtcaacggcaaagaggtgcacagcggcgtgtgtaccgacccccagccactgaaagaacagcccgccctgaacgacagccggtactgcctgagcagcagactgagagtgtccgccaccttctggcagaacccccggaaccacttcagatgccaggtgcagttctacggcctgagcgagaacgacgagtggacccaggacagagccaagcccgtgacccagatcgtgtctgccgaagcctggggcagagccgattgcggatcccagagcttcggcctgctggaccccaagctgtgctacctgctggatggcatcctgttcatctacggcgtgatcctgaccgccctgttcctgaggagtaagaggagcaggctcctgcacagtgactacatgaacatgactccacgccgccccggacccacccgcaagcattaccagccctatgccccaccacgcgacttcgcagcctatcgctccagagtgaagttcagcagaagcgccgacgcccctgcctaccagcagggacagaaccaactgtacaacgagctgaacctgggcagacgggaagagtacgacgtgctggacaagcggagaggcagggaccctgagatgggcggaaagccccagcggagaaagaacccccaggaaggactgtataacgaactccagaaagacaagatggccgaagcctacagcgagatcggcatgaagggcgagcggagaagaggcaagggccacgatggcctgtaccagggcctgagcaccgccaccaaggacacctatgacgccctgcacatgcaggccctgcctccaagaagggccaagcgatctggatctggagcaacaaacttctcactactcaaacaagcaggtgacgtggaggagaatcccgggcctactagtatggactggatttggcgcatccttttccttgtcggcgctgctaccggcgcgcattccttcgaacaagaagtgacacagatccctgccgctctgtctgtgcctgagggcgaaaacctggtgctgaactgctccttcaccgacagcgccatctacaacctccagtggttcaggcaggaccctggaaagggactgacaagcctgctgctgatccagagcagccagagagagcagacctccggcagactgaatgccagcctggataagagcagcggcaggtctaccctgtatatcgccgcttctcagcctggcgatagcgccacatatctgtgtgctgtgcggcctacaagcggcggcagctacatccctacatttggcagaggcaccagcctgatcgtgcacccttatacgcgtatccagaaccctgatcctgccgtgtaccagctgcgggatagcaagagcagcgacaagagcgtgtgtctgttcaccgacttcgacagccagaccaacgtgtcccagagcaaggactccgacgtgtacatcaccgataagtgcgtgctggacatgcggagcatggacttcaagagcaactccgccgtggcctggtccaacaagtccgatttcgcctgcgccaacgccttcaacaacagcattatccccgaggacacattcttcccaagccccgagagcagctgcggtacccagagttttgggttgttggaccctaaattgtgctatctgttggacggaatcctgttcatttacggagtgatcctgaccgcattgttcctgcgggttaagttttccagatccgcagacgcacccgcttaccaacaagggcagaaccaactctacaatgaacttaatttggggcggagggaagagtacgacgttctggacaaaaggaggggacgagatcccgagatgggcggaaagcctcagcgaaggaagaatccgcaagaggggctttataacgaactccagaaagataaaatggcagaagcctatagtgagattgggatgaagggagaaaggaggaggggtaaaggtcacgatgggttgtaccaaggattgagcacagccactaaagatacctatgatgcgctccacatgcaggccctgccgccaaga

SEQ ID NO: 9371 - DNA, 2691 bp, Artificial Sequence
  Synthetic Polynucleotide
atggccttaccagtgaccgccttgctcctgccgctggccttgctgctccacgccgccaggccgaatgctggcgtgacccagacacctaagttccaggtgctgaaaaccggccagagcatgaccctgcaatgcgcccaggacatgaaccatgagtacatgagctggtacagacaggaccccggcatgggcctgagactgatccactactctgtggctatccagaccaccgaccagggcgaagtgcccaatggctacaacgtgtccagaagcaccatcgaggacttcccactgagactgctgtctgccgctcctagccagaccagcgtgtacttttgtgccagcagctacctgggcaacaccggcgagctgttttttggcgagggcagcagactgaccgtgctcgaggacctgaagaacgtgttcccacctgaggtggccgtgttcgagcctagcgaggccgagatcagccacacccagaaagccaccctcgtgtgcctggctaccggcttctaccccgaccatgtggaactgtcttggtgggtcaacggcaaagaggtgcacagcggcgtgtgtaccgacccccagccactgaaagaacagcccgccctgaacgacagccggtactgcctgagcagcagactgagagtgtccgccaccttctggcagaacccccggaaccacttcagatgccaggtgcagttctacggcctgagcgagaacgacgagtggacccaggacagagccaagcccgtgacccagatcgtgtctgccgaagcctggggcagagccgattgcggatcccagagcttcggcctgctggaccccaagctgtgctacctgctggatggcatcctgttcatctacggcgtgatcctgaccgccctgttcctgaggagtaagaggagcaggctcctgcacagtgactacatgaacatgactccacgccgccccggacccacccgcaagcattaccagccctatgccccaccacgcgacttcgcagcctatcgctccagagtgaagttcagcagaagcgccgacgcccctgcctaccagcagggacagaaccaactgtacaacgagctgaacctgggcagacgggaagagtacgacgtgctggacaagcggagaggcagggaccctgagatgggcggaaagccccagcggagaaagaacccccaggaaggactgtataacgaactccagaaagacaagatggccgaagcctacagcgagatcggcatgaagggcgagcggagaagaggcaagggccacgatggcctgtaccagggcctgagcaccgccaccaaggacacctatgacgccctgcacatgcaggccctgcctccaagaagggccaagcgatctggatctggagcaacaaacttctcactactcaaacaagcaggtgacgtggaggagaatcccgggcctactagtatggactggatttggcgcatccttttccttgtcggcgctgctaccggcgcgcattccttcgaacaagaagtgacacagatccctgccgctctgtctgtgcctgagggcgaaaacctggtgctgaactgctccttcaccgacagcgccatctacaacctccagtggttcaggcaggaccctggaaagggactgacaagcctgctgctgatccagagcagccagagagagcagacctccggcagactgaatgccagcctggataagagcagcggcaggtctaccctgtatatcgccgcttctcagcctggcgatagcgccacatatctgtgtgctgtgcggcctacaagcggcggcagctacatccctacatttggcagaggcaccagcctgatcgtgcacccttatacgcgtatccagaaccctgatcctgccgtgtaccagctgcgggatagcaagagcagcgacaagagcgtgtgtctgttcaccgacttcgacagccagaccaacgtgtcccagagcaaggactccgacgtgtacatcaccgataagtgcgtgctggacatgcggagcatggacttcaagagcaactccgccgtggcctggtccaacaagtccgatttcgcctgcgccaacgccttcaacaacagcattatccccgaggacacattcttcccaagccccgagagcagctgcggtacccagagttttgggttgttggaccctaaattgtgctatctgttggacggaatcctgttcatttacggagtgatcctgaccgcattgttcctgaggagcaagcggtcacggctgctccacagcgattacatgaatatgacaccacgaagaccgggtcctactcgcaaacactaccaaccctacgcacctccccgcgactttgcagcgtaccgatctcgggttaagttttccagatccgcagacgcacccgcttaccaacaagggcagaaccaactctacaatgaacttaatttggggcggagggaagagtacgacgttctggacaaaaggaggggacgagatcccgagatgggcggaaagcctcagcgaaggaagaatccgcaagaggggctttataacgaactccagaaagataaaatggcagaagcctatagtgagattgggatgaagggagaaaggaggaggggtaaaggtcacgatgggttgtaccaaggattgagcacagccactaaagatacctatgatgcgctccacatgcaggccctgccgccaaga

SEQ ID NO: 9372 - DNA, 2445 bp, Artificial Sequence
  Synthetic Polynucleotide
atggccttaccagtgaccgccttgctcctgccgctggccttgctgctccacgccgccaggccgaatgctggcgtgacccagacacctaagttccaggtgctgaaaaccggccagagcatgaccctgcaatgcgcccaggacatgaaccatgagtacatgagctggtacagacaggaccccggcatgggcctgagactgatccactactctgtggctatccagaccaccgaccagggcgaagtgcccaatggctacaacgtgtccagaagcaccatcgaggacttcccactgagactgctgtctgccgctcctagccagaccagcgtgtacttttgtgccagcagctacctgggcaacaccggcgagctgttttttggcgagggcagcagactgaccgtgctcgaggacctgaagaacgtgttcccacctgaggtggccgtgttcgagcctagcgaggccgagatcagccacacccagaaagccaccctcgtgtgcctggctaccggcttctaccccgaccatgtggaactgtcttggtgggtcaacggcaaagaggtgcacagcggcgtgtctaccgacccccagccactgaaagaacagcccgccctgaacgacagccggtactgcctgagcagcagactgagagtgtccgccaccttctggcagaacccccggaaccacttcagatgccaggtgcagttctacggcctgagcgagaacgacgagtggacccaggacagagccaagcccgtgacccagatcgtgtctgccgaagcctggggcagagccgattgcggatcccagagcttcggcctgctggaccccaagctgtgctacctgctggatggcatcctgttcatctacggcgtgatcctgaccgccctgttcctgagagtgaagttcagcagaagcgccgacgcccctgcctaccagcagggacagaaccaactgtacaacgagctgaacctgggcagacgggaagagtacgacgtgctggacaagcggagaggcagggaccctgagatgggcggaaagccccagcggagaaagaacccccaggaaggactgtataacgaactccagaaagacaagatggccgaagcctacagcgagatcggcatgaagggcgagcggagaagaggcaagggccacgatggcctgtaccagggcctgagcaccgccaccaaggacacctatgacgccctgcacatgcaggccctgcctccaagaagggccaagcgatctggatctggagcaacaaacttctcactactcaaacaagcaggtgacgtggaggagaatcccgggcctactagtatggactggatttggcgcatccttttccttgtcggcgctgctaccggcgcgcattccttcgaacaagaagtgacacagatccctgccgctctgtctgtgcctgagggcgaaaacctggtgctgaactgctccttcaccgacagcgccatctacaacctccagtggttcaggcaggaccctggaaagggactgacaagcctgctgctgatccagagcagccagagagagcagacctccggcagactgaatgccagcctggataagagcagcggcaggtctaccctgtatatcgccgcttctcagcctggcgatagcgccacatatctgtgtgctgtgcggcctacaagcggcggcagctacatccctacatttggcagaggcaccagcctgatcgtgcacccttatacgcgtatccagaaccctgatcctgccgtgtaccagctgcgggatagcaagagcagcgacaagagcgtgtgtctgttcaccgacttcgacagccagaccaacgtgtcccagagcaaggactccgacgtgtacatcaccgataagaccgtgctggacatgcggagcatggacttcaagagcaactccgccgtggcctggtccaacaagtccgatttcgcctgcgccaacgccttcaacaacagcattatccccgaggacacattcttcccaagccccgagagcagctgcggtacccagagttttgggttgttggaccctaaattgtgctatctgttggacggaatcctgttcatttacggagtgatcctgaccgcattgttcctgcgggttaagttttccagatccgcagacgcacccgcttaccaacaagggcagaaccaactctacaatgaacttaatttggggcggagggaagagtacgacgttctggacaaaaggaggggacgagatcccgagatgggcggaaagcctcagcgaaggaagaatccgcaagaggggctttataacgaactccagaaagataaaatggcagaagcctatagtgagattgggatgaagggagaaaggaggaggggtaaaggtcacgatgggttgtaccaaggattgagcacagccactaaagatacctatgatgcgctccacatgcaggccctgccgccaaga

SEQ ID NO: 9373 - DNA, 3072 bp, Artificial Sequence
  Synthetic Polynucleotide
atggccttaccagtgaccgccttgctcctgccgctggccttgctgctccacgccgccaggccgaatgctggcgtgacccagacacctaagttccaggtgctgaaaaccggccagagcatgaccctgcaatgcgcccaggacatgaaccatgagtacatgagctggtacagacaggaccccggcatgggcctgagactgatccactactctgtggctatccagaccaccgaccagggcgaagtgcccaatggctacaacgtgtccagaagcaccatcgaggacttcccactgagactgctgtctgccgctcctagccagaccagcgtgtacttttgtgccagcagctacctgggcaacaccggcgagctgttttttggcgagggcagcagactgaccgtgctcgaggacaagcagctggacgccgacgtgtcccccaagcctaccatcttcctgccctctatcgccgagacaaagctccagaaggccggcacctacctgtgcctgctggaaaagttcttcccagatgtgattaagatccactggcaggaaaagaagtccaacaccatcctgggcagccaggaaggcaacaccatgaagaccaacgacacctacatgaagttcagctggctgaccgtgcccgagaagtccctggacaaagaacacagatgcatcgtgcggcacgaaaacaacaagaacggcgtggaccaggaaatcatcttcccacccatcaagaccgatgtgattacaggatcccagagcttcggcctgctggaccccaagctgtgctacctgctggatggcatcctgttcatctacggcgtgatcctgaccgccctgttcctgagagtgaagttcagcagaagcgccgacgcccctgcctaccagcagggacagaaccaactgtacaacgagctgaacctgggcagacgggaagagtacgacgtgctggacaagcggagaggcagggaccctgagatgggcggaaagccccagcggagaaagaacccccaggaaggactgtataacgaactccagaaagacaagatggccgaagcctacagcgagatcggcatgaagggcgagcggagaagaggcaagggccacgatggcctgtaccagggcctgagcaccgccaccaaggacacctatgacgccctgcacatgcaggccctgcctccaagaagggccaagcgatctggatctggagcaacaaacttctcactactcaaacaagcaggtgacgtggaggagaatcccgggcctactagtatggactggatttggcgcatccttttccttgtcggcgctgctaccggcgcgcattccttcgaacaagaagtgacacagatccctgccgctctgtctgtgcctgagggcgaaaacctggtgctgaactgctccttcaccgacagcgccatctacaacctccagtggttcaggcaggaccctggaaagggactgacaagcctgctgctgatccagagcagccagagagagcagacctccggcagactgaatgccagcctggataagagcagcggcaggtctaccctgtatatcgccgcttctcagcctggcgatagcgccacatatctgtgtgctgtgcggcctacaagcggcggcagctacatccctacatttggcagaggcaccagcctgatcgtgcacccttatacgcgtagccagcctcacaccaagcccagcgtgttcgtgatgaagaacggcaccaacgtggcctgcctcgtgaaagagttctaccccaaggacatcaggatcaacctggtgtccagcaagaagatcaccgagttcgaccccgccatcgtgatctcccccagcggcaagtacaacgccgtgaagctggggaagtacgaggacagcaacagcgtgacctgctccgtgcagcacgacaacaagaccgtgcacagcaccgactttggtacccagagttttgggttgttggaccctaaattgtgctatctgttggacggaatcctgttcatttacggagtgatcctgaccgcattgttcctgcgggttaagttttccagatccgcagacgcacccgcttaccaacaagggcagaaccaactctacaatgaacttaatttggggcggagggaagagtacgacgttctggacaaaaggaggggacgagatcccgagatgggcggaaagcctcagcgaaggaagaatccgcaagaggggctttataacgaactccagaaagataaaatggcagaagcctatagtgagattgggatgaagggagaaaggaggaggggtaaaggtcacgatgggttgtaccaaggattgagcacagccactaaagatacctatgatgcgctccacatgcaggccctgccgccaagacgcgccaagagaagcggatctggcgtgaagcagaccctgaatttcgacctgctgaagctggctggcgacgtggaatccaacccaggcccttctagaggccatatgaccgagtacaagcccacggtgcgcctcgccacccgcgacgacgtccccagggccgtacgcaccctcgccgccgcgttcgccgactaccccgccacgcgccacaccgtcgatccggaccgccacatcgagcgggtcaccgagctgcaagaactcttcctcacgcgcgtcgggctcgacatcggcaaggtgtgggtcgcggacgacggcgccgcggtggcggtctggaccacgccggagagcgtcgaagcgggggcggtgttcgccgagatcggcccgcgcatggccgagttgagcggttcccggctggccgcgcagcaacagatggaaggcctcctggcgccgcaccggcccaaggagcccgcgtggttcctggccaccgtcggcgtctcgcccgaccaccagggcaagggtctgggcagcgccgtcgtgctccccggagtggaggcggccgagcgcgccggggtgcccgccttcctggagacctccgcgccccgcaacctccccttctacgagcggctcggcttcaccgtcaccgccgacgtcgaggtgcccgaaggaccgcgcacctggtgcatgacccgcaagcccggtgcctga

SEQ ID NO: 9374 - DNA, 2682 bp, Artificial Sequence
  Synthetic Polynucleotide
atggccttaccagtgaccgccttgctcctgccgctggccttgctgctccacgccgccaggccgaatgctggcgtgacccagacacctaagttccaggtgctgaaaaccggccagagcatgaccctgcaatgcgcccaggacatgaaccatgagtacatgagctggtacagacaggaccccggcatgggcctgagactgatccactactctgtggctatccagaccaccgaccagggcgaagtgcccaatggctacaacgtgtccagaagcaccatcgaggacttcccactgagactgctgtctgccgctcctagccagaccagcgtgtacttttgtgccagcagctacctgggcaacaccggcgagctgttttttggcgagggcagcagactgaccgtgctcgagggacagcctaaggccaatcctaccgtgacactgttccctccaagcagcgaagaactccaggccaacaaggccacacttgtgtgcctgatctccgacttctaccctggggctgtgacagtggcttggaaggccgatggatctcctgtgaaagccggcgtggaaaccaccaagccatccaagcagagcaacaacaaatacgccgccagctcctacctgagcctgacacctgagcagtggaagtcccacagatcctacagctgccaagtgacccacgaaggcagcaccgtggaaaagacagtggcccctacagagtgcagcacaacacctggcgagagaagtagcctgcctgccttctatcctggcaccagcggctcttgttctggctgtggatctctgagcctgcctctgctggctggactggttgctgctgatgctgtggcctctctgctgattgtgggagccgtgttcctgtgcgccagacctagaagaagccccgctcaagaggacggcaaggtgtacatcaacatgcccggcagaggaagggccaagcgatctggatctggagcaacaaacttctcactactcaaacaagcaggtgacgtggaggagaatcccgggcctactagtatggactggatttggcgcatccttttccttgtcggcgctgctaccggcgcgcattccttcgaacaagaagtgacacagatccctgccgctctgtctgtgcctgagggcgaaaacctggtgctgaactgctccttcaccgacagcgccatctacaacctccagtggttcaggcaggaccctggaaagggactgacaagcctgctgctgatccagagcagccagagagagcagacctccggcagactgaatgccagcctggataagagcagcggcaggtctaccctgtatatcgccgcttctcagcctggcgatagcgccacatatctgtgtgctgtgcggcctacaagcggcggcagctacatccctacatttggcagaggcaccagcctgatcgtgcacccttatacgcgtgcctctacaaagggaccctccgtgtttcctctggctcccagcagcaagtctacaagcggaggaacagccgctctgggctgcctggtcaaggattactttcccgagcctgtgaccgtgtcctggaatagcggagcactgacaagcggcgtgcacacctttccagccgtgctgcaaagcagcggcctgtactctctgagcagcgtggtcacagtgcctagctctagcctgggcacccagacctacatctgcaatgtgaaccacaagcctagcaacaccaaggtggacaagagagtggaacccaagagctgtacaacgccgggcgaaaggagttccttgccggccttttaccccggcacaagcggaagctgtagtgggtgtggaagcctcagcctcccacttcttgcgggcctcgtcgcggcagatgcagtagcttcacttcttattgtaggcgcggtatttctctgtgctcgaccaaggaggtcacccgctcaggaggatggtaaggtgtatataaatatgccaggacgcggacgcgccaagagaagcggatctggcgtgaagcagaccctgaatttcgacctgctgaagctggctggcgacgtggaatccaacccaggcccttctagaggccatatgaccgagtacaagcccacggtgcgcctcgccacccgcgacgacgtccccagggccgtacgcaccctcgccgccgcgttcgccgactaccccgccacgcgccacaccgtcgatccggaccgccacatcgagcgggtcaccgagctgcaagaactcttcctcacgcgcgtcgggctcgacatcggcaaggtgtgggtcgcggacgacggcgccgcggtggcggtctggaccacgccggagagcgtcgaagcgggggcggtgttcgccgagatcggcccgcgcatggccgagttgagcggttcccggctggccgcgcagcaacagatggaaggcctcctggcgccgcaccggcccaaggagcccgcgtggttcctggccaccgtcggcgtctcgcccgaccaccagggcaagggtctgggcagcgccgtcgtgctccccggagtggaggcggccgagcgcgccggggtgcccgccttcctggagacctccgcgccccgcaacctccccttctacgagcggctcggcttcaccgtcaccgccgacgtcgaggtgcccgaaggaccgcgcacctggtgcatgacccgcaagcccggtgcctgagtcgac

SEQ ID NO: 9375 - DNA, 2163 bp, Artificial Sequence
  Synthetic Polynucleotide
atggccttaccagtgaccgccttgctcctgccgctggccttgctgctccacgccgccaggccgaatgctggcgtgacccagacacctaagttccaggtgctgaaaaccggccagagcatgaccctgcaatgcgcccaggacatgaaccatgagtacatgagctggtacagacaggaccccggcatgggcctgagactgatccactactctgtggctatccagaccaccgaccagggcgaagtgcccaatggctacaacgtgtccagaagcaccatcgaggacttcccactgagactgctgtctgccgctcctagccagaccagcgtgtacttttgtgccagcagctacctgggcaacaccggcgagctgttttttggcgagggcagcagactgaccgtgctcgagggcgacatcgagaacaccagtctggcccctgaggaccctacctttcctgccgatacctggggcacctacctgctgaccacagagacaggactccagaaagatcacgccctgtgggaccacacagcccagaacctgctgagaatgggcctcgcctttctggtgctggttgccctcgtgtggttcctggtggaagattggctgagccggaagcggacaagagagagagccagcagagcctctacctgggagggaagaagaaggctgaacacccagacacttagggccaagcgatctggatctggagcaacaaacttctcactactcaaacaagcaggtgacgtggaggagaatcccgggcctactagtatggactggatttggcgcatccttttccttgtcggcgctgctaccggcgcgcattccttcgaacaagaagtgacacagatccctgccgctctgtctgtgcctgagggcgaaaacctggtgctgaactgctccttcaccgacagcgccatctacaacctccagtggttcaggcaggaccctggaaagggactgacaagcctgctgctgatccagagcagccagagagagcagacctccggcagactgaatgccagcctggataagagcagcggcaggtctaccctgtatatcgccgcttctcagcctggcgatagcgccacatatctgtgtgctgtgcggcctacaagcggcggcagctacatccctacatttggcagaggcaccagcctgatcgtgcacccttatacgcgtggcgatattgagaatacctctctggccccagaagatcctacattccccgccgacacatggggaacatatctgctgacaaccgaaaccgggctgcaaaaggaccatgctctgtgggatcataccgctcagaatctgcttcggatggggcttgcattcctggtcctggtggctcttgtctggtttctggtcgaggactggctgtcccggaagagaaccagagaaagagcttccagggccagcacctgggaaggcagacgcagactgaatactcagaccctgcgcgccaagagaagcggatctggcgtgaagcagaccctgaatttcgacctgctgaagctggctggcgacgtggaatccaacccaggcccttctagaggccatatgaccgagtacaagcccacggtgcgcctcgccacccgcgacgacgtccccagggccgtacgcaccctcgccgccgcgttcgccgactaccccgccacgcgccacaccgtcgatccggaccgccacatcgagcgggtcaccgagctgcaagaactcttcctcacgcgcgtcgggctcgacatcggcaaggtgtgggtcgcggacgacggcgccgcggtggcggtctggaccacgccggagagcgtcgaagcgggggcggtgttcgccgagatcggcccgcgcatggccgagttgagcggttcccggctggccgcgcagcaacagatggaaggcctcctggcgccgcaccggcccaaggagcccgcgtggttcctggccaccgtcggcgtctcgcccgaccaccagggcaagggtctgggcagcgccgtcgtgctccccggagtggaggcggccgagcgcgccggggtgcccgccttcctggagacctccgcgccccgcaacctccccttctacgagcggctcggcttcaccgtcaccgccgacgtcgaggtgcccgaaggaccgcgcacctggtgcatgacccgcaagcccggtgcctga

SEQ ID NO: 9376 - DNA, 1995 bp, Artificial Sequence
  Synthetic Polynucleotide
atggccttaccagtgaccgccttgctcctgccgctggccttgctgctccacgccgccaggccgaatgctggcgtgacccagacacctaagttccaggtgctgaaaaccggccagagcatgaccctgcaatgcgcccaggacatgaaccatgagtacatgagctggtacagacaggaccccggcatgggcctgagactgatccactactctgtggctatccagaccaccgaccagggcgaagtgcccaatggctacaacgtgtccagaagcaccatcgaggacttcccactgagactgctgtctgccgctcctagccagaccagcgtgtacttttgtgccagcagctacctgggcaacaccggcgagctgttttttggcgagggcagcagactgaccgtgctcgagatcactcaaggtttggcagtgtcaaccatctcatcattctttccacctggctaccaagtgtccttctgcctggtcatggtgctgctgttcgccgtggataccggcctgtacttcagcgtcaagaccaacatccggtccagcaccagagactggaaggaccacaagttcaagtggcggaaggaccctcaggacaagagggccaagcgatctggatctggagcaacaaacttctcactactcaaacaagcaggtgacgtggaggagaatcccgggcctactagtatggactggatttggcgcatccttttccttgtcggcgctgctaccggcgcgcattccttcgaacaagaagtgacacagatccctgccgctctgtctgtgcctgagggcgaaaacctggtgctgaactgctccttcaccgacagcgccatctacaacctccagtggttcaggcaggaccctggaaagggactgacaagcctgctgctgatccagagcagccagagagagcagacctccggcagactgaatgccagcctggataagagcagcggcaggtctaccctgtatatcgccgcttctcagcctggcgatagcgccacatatctgtgtgctgtgcggcctacaagcggcggcagctacatccctacatttggcagaggcaccagcctgatcgtgcacccttatacgcgtatcacccagggcctggccgtgtctaccatcagcagctttttcccacccggctaccaggtgtccttctgcctcgtgatggtgctgctgttcgccgtggacaccggcctgtacttcagcgtgaaaacaaacatccggtccagcaccagagactggaaggaccacaagttcaagtggcggaaggacccccaggacaagcgcgccaagagaagcggatctggcgtgaagcagaccctgaatttcgacctgctgaagctggctggcgacgtggaatccaacccaggcccttctagaggccatatgaccgagtacaagcccacggtgcgcctcgccacccgcgacgacgtccccagggccgtacgcaccctcgccgccgcgttcgccgactaccccgccacgcgccacaccgtcgatccggaccgccacatcgagcgggtcaccgagctgcaagaactcttcctcacgcgcgtcgggctcgacatcggcaaggtgtgggtcgcggacgacggcgccgcggtggcggtctggaccacgccggagagcgtcgaagcgggggcggtgttcgccgagatcggcccgcgcatggccgagttgagcggttcccggctggccgcgcagcaacagatggaaggcctcctggcgccgcaccggcccaaggagcccgcgtggttcctggccaccgtcggcgtctcgcccgaccaccagggcaagggtctgggcagcgccgtcgtgctccccggagtggaggcggccgagcgcgccggggtgcccgccttcctggagacctccgcgccccgcaacctccccttctacgagcggctcggcttcaccgtcaccgccgacgtcgaggtgcccgaaggaccgcgcacctggtgcatgacccgcaagcccggtgcctga

SEQ ID NO: 9377 - DNA, 2703 bp, Artificial Sequence
  Synthetic Polynucleotide
atggccttaccagtgaccgccttgctcctgccgctggccttgctgctccacgccgccaggccgaatgctggcgtgacccagacacctaagttccaggtgctgaaaaccggccagagcatgaccctgcaatgcgcccaggacatgaaccatgagtacatgagctggtacagacaggaccccggcatgggcctgagactgatccactactctgtggctatccagaccaccgaccagggcgaagtgcccaatggctacaacgtgtccagaagcaccatcgaggacttcccactgagactgctgtctgccgctcctagccagaccagcgtgtacttttgtgccagcagctacctgggcaacaccggcgagctgttttttggcgagggcagcagactgaccgtgctcgagctgtgggtttcacagcctccagagatcagaaccctggaaggcagcagcgccttcctgccttgcagcttcaatgcctctcagggcagactggctatcggcagcgtgacctggttcagagatgaggtggtgcccggcaaagaagtgcggaacggcacccctgagtttagaggaaggctggcccctctggcctccagcagatttctgcacgatcaccaggccgagctgcacatcagagatgtgcgaggacacgacgccagcatctacgtgtgcagagtggaagtgctcggcctcggagttggcacaggcaatggaacaagactggtggtggaaaaagagcaccctcagctcggagccggaacagtgctgcttctgagagccggcttttacgccgtgtcctttctgtctgtggccgtgggcagcaccgtgtactatcagggcaagtgcctgacctggaagggacctagaaggcaactgcctgctgtggtgcctgctcctttgcctcctccatgtggaagctctgcccatctgctgccacctgttccaggcggaagggccaagcgatctggatctggagcaacaaacttctcactactcaaacaagcaggtgacgtggaggagaatcccgggcctactagtatggactggatttggcgcatccttttccttgtcggcgctgctaccggcgcgcattccttcgaacaagaagtgacacagatccctgccgctctgtctgtgcctgagggcgaaaacctggtgctgaactgctccttcaccgacagcgccatctacaacctccagtggttcaggcaggaccctggaaagggactgacaagcctgctgctgatccagagcagccagagagagcagacctccggcagactgaatgccagcctggataagagcagcggcaggtctaccctgtatatcgccgcttctcagcctggcgatagcgccacatatctgtgtgctgtgcggcctacaagcggcggcagctacatccctacatttggcagaggcaccagcctgatcgtgcacccttatacgcgtctgtgggtgtcccagccacctgaaattcggacactggaaggctcctccgcctttctgccctgtagctttaacgccagccaggggagactcgccatcggctctgtgacatggttccgggatgaagtcgtccctggaaaagaagttcgcaacggaacaccagagttcagaggcagactcgccccactggcaagctccagattcctgcatgaccatcaggctgaactgcacattagggacgtgcggggccacgatgcctccatctatgtgtgtcgggtcgaagtgcttggactcggcgtcggaactggaaacggcactaggctggtggtcgagaaagaacatccacagcttggcgctggcaccgtcctgttgcttagagccggattctatgccgtcagcttcctgtccgtggctgtggggtctacagtgtattaccagggaaaatgtctcacctggaaaggccccagacgccagcttccagctgttgttcctgctccactgccaccaccttgtggctcctctgctcacttgcttccaccagtgcctggcggacgcgccaagagaagcggatctggcgtgaagcagaccctgaatttcgacctgctgaagctggctggcgacgtggaatccaacccaggcccttctagaggccatatgaccgagtacaagcccacggtgcgcctcgccacccgcgacgacgtccccagggccgtacgcaccctcgccgccgcgttcgccgactaccccgccacgcgccacaccgtcgatccggaccgccacatcgagcgggtcaccgagctgcaagaactcttcctcacgcgcgtcgggctcgacatcggcaaggtgtgggtcgcggacgacggcgccgcggtggcggtctggaccacgccggagagcgtcgaagcgggggcggtgttcgccgagatcggcccgcgcatggccgagttgagcggttcccggctggccgcgcagcaacagatggaaggcctcctggcgccgcaccggcccaaggagcccgcgtggttcctggccaccgtcggcgtctcgcccgaccaccagggcaagggtctgggcagcgccgtcgtgctccccggagtggaggcggccgagcgcgccggggtgcccgccttcctggagacctccgcgccccgcaacctccccttctacgagcggctcggcttcaccgtcaccgccgacgtcgaggtgcccgaaggaccgcgcacctggtgcatgacccgcaagcccggtgcctga

SEQ ID NO: 9378 - DNA, 2703 bp, Artificial Sequence; identical to SEQ ID NO: 9377
  Synthetic Polynucleotide

SEQ ID NO: 9379 - DNA, 2388 bp, Artificial Sequence
  Synthetic Polynucleotide
atggccttaccagtgaccgccttgctcctgccgctggccttgctgctccacgccgccaggccgaatgctggcgtgacccagacacctaagttccaggtgctgaaaaccggccagagcatgaccctgcaatgcgcccaggacatgaaccatgagtacatgagctggtacagacaggaccccggcatgggcctgagactgatccactactctgtggctatccagaccaccgaccagggcgaagtgcccaatggctacaacgtgtccagaagcaccatcgaggacttcccactgagactgctgtctgccgctcctagccagaccagcgtgtacttttgtgccagcagctacctgggcaacaccggcgagctgttttttggcgagggcagcagactgaccgtgggacagcctaaggccaatcctaccgtgacactgttccctccaagcagcgaagaactccaggccaacaaggccacacttgtgtgcctgatctccgacttctaccctggggctgtgacagtggcttggaaggccgatggatctcctgtgaaagccggcgtggaaaccaccaagccatccaagcagagcaacaacaaatacgccgccagctcctacctgagcctgacacctgagcagtggaagtcccacagatcctacagctgccaagtgacccacgaaggcagcaccgtggaaaagacagtggcccctacagagtgcagcggatcccagagcttcggcctgctggaccccaagctgtgctacctgctggatggcatcctgttcatctacggcgtgatcctgaccgccctgttcctgagagtgaagttcagcagaagcgccgacgcccctgcctaccagcagggacagaaccaactgtacaacgagctgaacctgggcagacgggaagagtacgacgtgctggacaagcggagaggcagggaccctgagatgggcggaaagccccagcggagaaagaacccccaggaaggactgtataacgaactccagaaagacaagatggccgaagcctacagcgagatcggcatgaagggcgagcggagaagaggcaagggccacgatggcctgtaccagggcctgagcaccgccaccaaggacacctatgacgccctgcacatgcaggccctgcctccaagaagggccaagcgatctggatctggagcaacaaacttctcactactcaaacaagcaggtgacgtggaggagaatcccgggcctactagtatggactggatttggcgcatccttttccttgtcggcgctgctaccggcgcgcattccttcgaacaagaagtgacacagatccctgccgctctgtctgtgcctgagggcgaaaacctggtgctgaactgctccttcaccgacagcgccatctacaacctccagtggttcaggcaggaccctggaaagggactgacaagcctgctgctgatccagagcagccagagagagcagacctccggcagactgaatgccagcctggataagagcagcggcaggtctaccctgtatatcgccgcttctcagcctggcgatagcgccacatatctgtgtgctgtgcggcctacaagcggcggcagctacatccctacatttggcagaggcaccagcctgatcgtgcacccttatgcctctacaaagggaccctccgtgtttcctctggctcccagcagcaagtctacaagcggaggaacagccgctctgggctgcctggtcaaggattactttcccgagcctgtgaccgtgtcctggaatagcggagcactgacaagcggcgtgcacacctttccagccgtgctgcaaagcagcggcctgtactctctgagcagcgtggtcacagtgcctagctctagcctgggcacccagacctacatctgcaatgtgaaccacaagcctagcaacaccaaggtggacaagagagtggaacccaagagctgtggtacccagagttttgggttgttggaccctaaattgtgctatctgttggacggaatcctgttcatttacggagtgatcctgaccgcattgttcctgcgggttaagttttccagatccgcagacgcacccgcttaccaacaagggcagaaccaactctacaatgaacttaatttggggcggagggaagagtacgacgttctggacaaaaggaggggacgagatcccgagatgggcggaaagcctcagcgaaggaagaatccgcaagaggggctttataacgaactccagaaagataaaatggcagaagcctatagtgagattgggatgaagggagaaaggaggaggggtaaaggtcacgatgggttgtaccaaggattgagcacagccactaaagatacctatgatgcgctccacatgcaggccctgccgccaaga

SEQ ID NO: 9380 - DNA, 1686 bp, Artificial Sequence
  Synthetic Polynucleotide
atggccttaccagtgaccgccttgctcctgccgctggccttgctgctccacgccgccaggccgaatgctggcgtgacccagacacctaagttccaggtgctgaaaaccggccagagcatgaccctgcaatgcgcccaggacatgaaccatgagtacatgagctggtacagacaggaccccggcatgggcctgagactgatccactactctgtggctatccagaccaccgaccagggcgaagtgcccaatggctacaacgtgtccagaagcaccatcgaggacttcccactgagactgctgtctgccgctcctagccagaccagcgtgtacttttgtgccagcagctacctgggcaacaccggcgagctgttttttggcgagggcagcagactgaccgtgctcgagcagagcttcggcctgctggaccccaagctgtgctacctgctggatggcatcctgttcatctacggcgtgatcctgaccgccctgttcctgagagtgaagttcagcagaagcgccgacgcccctgcctaccagcagggacagaaccaactgtacaacgagctgaacctgggcagacgggaagagtacgacgtgctggacaagcggagaggcagggaccctgagatgggcggaaagccccagcggagaaagaacccccaggaaggactgtataacgaactccagaaagacaagatggccgaagcctacagcgagatcggcatgaagggcgagcggagaagaggcaagggccacgatggcctgtaccagggcctgagcaccgccaccaaggacacctatgacgccctgcacatgcaggccctgcctccaagaagggccaagcgatctggatctggagcaacaaacttctcactactcaaacaagcaggtgacgtggaggagaatcccgggcctactagtatggactggatttggcgcatccttttccttgtcggcgctgctaccggcgcgcattccttcgaacaagaagtgacacagatccctgccgctctgtctgtgcctgagggcgaaaacctggtgctgaactgctccttcaccgacagcgccatctacaacctccagtggttcaggcaggaccctggaaagggactgacaagcctgctgctgatccagagcagccagagagagcagacctccggcagactgaatgccagcctggataagagcagcggcaggtctaccctgtatatcgccgcttctcagcctggcgatagcgccacatatctgtgtgctgtgcggcctacaagcggcggcagctacatccctacatttggcagaggcaccagcctgatcgtgcacccttatacgcgtcagagttttgggttgttggaccctaaattgtgctatctgttggacggaatcctgttcatttacggagtgatcctgaccgcattgttcctgcgggttaagttttccagatccgcagacgcacccgcttaccaacaagggcagaaccaactctacaatgaacttaatttggggcggagggaagagtacgacgttctggacaaaaggaggggacgagatcccgagatgggcggaaagcctcagcgaaggaagaatccgcaagaggggctttataacgaactccagaaagataaaatggcagaagcctatagtgagattgggatgaagggagaaaggaggaggggtaaaggtcacgat

SEQ ID NO: 9381 - DNA, 2733 bp, Artificial Sequence
  Synthetic Polynucleotide
atggccttaccagtgaccgccttgctcctgccgctggccttgctgctccacgccgccaggccgaatgctggcgtgacccagacacctaagttccaggtgctgaaaaccggccagagcatgaccctgcaatgcgcccaggacatgaaccatgagtacatgagctggtacagacaggaccccggcatgggcctgagactgatccactactctgtggctatccagaccaccgaccagggcgaagtgcccaatggctacaacgtgtccagaagcaccatcgaggacttcccactgagactgctgtctgccgctcctagccagaccagcgtgtacttttgtgccagcagctacctgggcaacaccggcgagctgttttttggcgagggcagcagactgaccgtgctcgagacaacacctggcgagagaagtagcctgcctgccttctatcctggcaccagcggctcttgttctggctgtggatctctgagcctgcctctgctggctggactggttgctgctgatgctgtggcctctctgctgattgtgggagccgtgttcctgtgcgccagacctagaagaagccccgctcaagaggacggcaaggtgtacatcaacatgcccggcagaggaagcactagtagagtgaagttcagcagaagcgccgacgcccctgcctaccagcagggacagaaccaactgtacaacgagctgaacctgggcagacgggaagagtacgacgtgctggacaagcggagaggcagggaccctgagatgggcggaaagccccagcggagaaagaacccccaggaaggactgtataacgaactccagaaagacaagatggccgaagcctacagcgagatcggcatgaagggcgagcggagaagaggcaagggccacgatggcctgtaccagggcctgagcaccgccaccaaggacacctatgacgccctgcacatgcaggccctgcctccaagaagggccaagcgatctggatctggagcaacaaacttctcactactcaaacaagcaggtgacgtggaggagaatcccgggcctatggactggatttggcgcatccttttccttgtcggcgctgctaccggcgcgcattccttcgaacaagaagtgacacagatccctgccgctctgtctgtgcctgagggcgaaaacctggtgctgaactgctccttcaccgacagcgccatctacaacctccagtggttcaggcaggaccctggaaagggactgacaagcctgctgctgatccagagcagccagagagagcagacctccggcagactgaatgccagcctggataagagcagcggcaggtctaccctgtatatcgccgcttctcagcctggcgatagcgccacatatctgtgtgctgtgcggcctacaagcggcggcagctacatccctacatttggcagaggcaccagcctgatcgtgcacccttatacgcgtacaacgccgggcgaaaggagttccttgccggccttttaccccggcacaagcggaagctgtagtgggtgtggaagcctcagcctcccacttcttgcgggcctcgtcgcggcagatgcagtagcttcacttcttattgtaggcgcggtatttctctgtgctcgaccaaggaggtcacccgctcaggaggatggtaaggtgtatataaatatgccaggacgcggaagctctagacgggttaagttttccagatccgcagacgcacccgcttaccaacaagggcagaaccaactctacaatgaacttaatttggggcggagggaagagtacgacgttctggacaaaaggaggggacgagatcccgagatgggcggaaagcctcagcgaaggaagaatccgcaagaggggctttataacgaactccagaaagataaaatggcagaagcctatagtgagattgggatgaagggagaaaggaggaggggtaaaggtcacgatgggttgtaccaaggattgagcacagccactaaagatacctatgatgcgctccacatgcaggccctgccgccaagacgcgccaagagaagcggatctggcgtgaagcagaccctgaatttcgacctgctgaagctggctggcgacgtggaatccaacccaggccctggccatatgaccgagtacaagcccacggtgcgcctcgccacccgcgacgacgtccccagggccgtacgcaccctcgccgccgcgttcgccgactaccccgccacgcgccacaccgtcgatccggaccgccacatcgagcgggtcaccgagctgcaagaactcttcctcacgcgcgtcgggctcgacatcggcaaggtgtgggtcgcggacgacggcgccgcggtggcggtctggaccacgccggagagcgtcgaagcgggggcggtgttcgccgagatcggcccgcgcatggccgagttgagcggttcccggctggccgcgcagcaacagatggaaggcctcctggcgccgcaccggcccaaggagcccgcgtggttcctggccaccgtcggcgtctcgcccgaccaccagggcaagggtctgggcagcgccgtcgtgctccccggagtggaggcggccgagcgcgccggggtgcccgccttcctggagacctccgcgccccgcaacctccccttctacgagcggctcggcttcaccgtcaccgccgacgtcgaggtgcccgaaggaccgcgcacctggtgcatgacccgcaagcccggtgcctga

SEQ ID NO: 9382 - DNA, 2733 bp, Artificial Sequence; identical to SEQ ID NO: 9381
  Synthetic Polynucleotide

SEQ ID NO: 9383 - DNA, 3336 bp, Artificial Sequence
  Synthetic Polynucleotide
atggccttaccagtgaccgccttgctcctgccgctggccttgctgctccacgccgccaggccgaatgctggcgtgacccagacacctaagttccaggtgctgaaaaccggccagagcatgaccctgcaatgcgcccaggacatgaaccatgagtacatgagctggtacagacaggaccccggcatgggcctgagactgatccactactctgtggctatccagaccaccgaccagggcgaagtgcccaatggctacaacgtgtccagaagcaccatcgaggacttcccactgagactgctgtctgccgctcctagccagaccagcgtgtacttttgtgccagcagctacctgggcaacaccggcgagctgttttttggcgagggcagcagactgaccgtgctcgagggacagcctaaggccaatcctaccgtgacactgttccctccaagcagcgaagaactccaggccaacaaggccacacttgtgtgcctgatctccgacttctaccctggggctgtgacagtggcttggaaggccgatggatctcctgtgaaagccggcgtggaaaccaccaagccatccaagcagagcaacaacaaatacgccgccagctcctacctgagcctgacacctgagcagtggaagtcccacagatcctacagctgccaagtgacccacgaaggcagcaccgtggaaaagacagtggcccctacagagtgcagcggatccacaacacctggcgagagaagtagcctgcctgccttctatcctggcaccagcggctcttgttctggctgtggatctctgagcctgcctctgctggctggactggttgctgctgatgctgtggcctctctgctgattgtgggagccgtgttcctgtgcgccagacctagaagaagccccgctcaagaggacggcaaggtgtacatcaacatgcccggcagaggaagcactagtagagtgaagttcagcagaagcgccgacgcccctgcctaccagcagggacagaaccaactgtacaacgagctgaacctgggcagacgggaagagtacgacgtgctggacaagcggagaggcagggaccctgagatgggcggaaagccccagcggagaaagaacccccaggaaggactgtataacgaactccagaaagacaagatggccgaagcctacagcgagatcggcatgaagggcgagcggagaagaggcaagggccacgatggcctgtaccagggcctgagcaccgccaccaaggacacctatgacgccctgcacatgcaggccctgcctccaagaagggccaagcgatctggatctggagcaacaaacttctcactactcaaacaagcaggtgacgtggaggagaatcccgggcctatggactggatttggcgcatccttttccttgtcggcgctgctaccggcgcgcattccttcgaacaagaagtgacacagatccctgccgctctgtctgtgcctgagggcgaaaacctggtgctgaactgctccttcaccgacagcgccatctacaacctccagtggttcaggcaggaccctggaaagggactgacaagcctgctgctgatccagagcagccagagagagcagacctccggcagactgaatgccagcctggataagagcagcggcaggtctaccctgtatatcgccgcttctcagcctggcgatagcgccacatatctgtgtgctgtgcggcctacaagcggcggcagctacatccctacatttggcagaggcaccagcctgatcgtgcacccttatacgcgtgcctctacaaagggaccctccgtgtttcctctggctcccagcagcaagtctacaagcggaggaacagccgctctgggctgcctggtcaaggattactttcccgagcctgtgaccgtgtcctggaatagcggagcactgacaagcggcgtgcacacctttccagccgtgctgcaaagcagcggcctgtactctctgagcagcgtggtcacagtgcctagctctagcctgggcacccagacctacatctgcaatgtgaaccacaagcctagcaacaccaaggtggacaagagagtggaacccaagagctgtggtaccacaacgccgggcgaaaggagttccttgccggccttttaccccggcacaagcggaagctgtagtgggtgtggaagcctcagcctcccacttcttgcgggcctcgtcgcggcagatgcagtagcttcacttcttattgtaggcgcggtatttctctgtgctcgaccaaggaggtcacccgctcaggaggatggtaaggtgtatataaatatgccaggacgcggaagctctagacgggttaagttttccagatccgcagacgcacccgcttaccaacaagggcagaaccaactctacaatgaacttaatttggggcggagggaagagtacgacgttctggacaaaaggaggggacgagatcccgagatgggcggaaagcctcagcgaaggaagaatccgcaagaggggctttataacgaactccagaaagataaaatggcagaagcctatagtgagattgggatgaagggagaaaggaggaggggtaaaggtcacgatgggttgtaccaaggattgagcacagccactaaagatacctatgatgcgctccacatgcaggccctgccgccaagacgcgccaagagaagcggatctggcgtgaagcagaccctgaatttcgacctgctgaagctggctggcgacgtggaatccaacccaggccctggccatatggctacctacgaggtgctgtgcgaggtggcaagaaagctgggcaccgacgacagagaagtggtgctgttcctgctgaacgtgttcatccctcagcctacactggcccagctgatcggtgcactgagagccctgaaagaggaaggccggctgacctttcctctgctggccgaatgcctgttcagagccggaagaagggatctgctgcgggacctgctgcatctggaccccagatttctggaaagacacctggccggcaccatgagctacttcagcccttaccagctgaccgtgctgcacgttgacggcgaactgtgcgccagagatattcggagcctgatcttcctgagcaaggacaccatcggcagccggtctacccctcagacatttctgcactgggtgtactgcatggaaaacctggacctgctcggccccacagatgtggatgccctgatgtccatgctgagaagcctgagcagagtggacctccagagacaggtgcagacactgatgggactgcacctgagcggacctagccacagccagcactacagacacacccct

SEQ ID NO: 9384 - DNA, 3495 bp, Artificial Sequence
  Synthetic Polynucleotide
atggccttaccagtgaccgccttgctcctgccgctggccttgctgctccacgccgccaggccgaatgctggcgtgacccagacacctaagttccaggtgctgaaaaccggccagagcatgaccctgcaatgcgcccaggacatgaaccatgagtacatgagctggtacagacaggaccccggcatgggcctgagactgatccactactctgtggctatccagaccaccgaccagggcgaagtgcccaatggctacaacgtgtccagaagcaccatcgaggacttcccactgagactgctgtctgccgctcctagccagaccagcgtgtacttttgtgccagcagctacctgggcaacaccggcgagctgttttttggcgagggcagcagactgaccgtgctcgagggacagcctaaggccaatcctaccgtgacactgttccctccaagcagcgaagaactccaggccaacaaggccacacttgtgtgcctgatctccgacttctaccctggggctgtgacagtggcttggaaggccgatggatctcctgtgaaagccggcgtggaaaccaccaagccatccaagcagagcaacaacaaatacgccgccagctcctacctgagcctgacacctgagcagtggaagtcccacagatcctacagctgccaagtgacccacgaaggcagcaccgtggaaaagacagtggcccctacagagtgcagcggatccacaacacctggcgagagaagtagcctgcctgccttctatcctggcaccagcggctcttgttctggctgtggatctctgagcctgcctctgctggctggactggttgctgctgatgctgtggcctctctgctgattgtgggagccgtgttcctgtgcgccagacctagaagaagccccgctcaagaggacggcaaggtgtacatcaacatgcccggcagaggaagcactagtagagtgaagttcagcagaagcgccgacgcccctgcctaccagcagggacagaaccaactgtacaacgagctgaacctgggcagacgggaagagtacgacgtgctggacaagcggagaggcagggaccctgagatgggcggaaagccccagcggagaaagaacccccaggaaggactgtataacgaactccagaaagacaagatggccgaagcctacagcgagatcggcatgaagggcgagcggagaagaggcaagggccacgatggcctgtaccagggcctgagcaccgccaccaaggacacctatgacgccctgcacatgcaggccctgcctccaagaagggccaagcgatctggatctggagcaacaaacttctcactactcaaacaagcaggtgacgtggaggagaatcccgggcctatggactggatttggcgcatccttttccttgtcggcgctgctaccggcgcgcattccttcgaacaagaagtgacacagatccctgccgctctgtctgtgcctgagggcgaaaacctggtgctgaactgctccttcaccgacagcgccatctacaacctccagtggttcaggcaggaccctggaaagggactgacaagcctgctgctgatccagagcagccagagagagcagacctccggcagactgaatgccagcctggataagagcagcggcaggtctaccctgtatatcgccgcttctcagcctggcgatagcgccacatatctgtgtgctgtgcggcctacaagcggcggcagctacatccctacatttggcagaggcaccagcctgatcgtgcacccttatacgcgtgcctctacaaagggaccctccgtgtttcctctggctcccagcagcaagtctacaagcggaggaacagccgctctgggctgcctggtcaaggattactttcccgagcctgtgaccgtgtcctggaatagcggagcactgacaagcggcgtgcacacctttccagccgtgctgcaaagcagcggcctgtactctctgagcagcgtggtcacagtgcctagctctagcctgggcacccagacctacatctgcaatgtgaaccacaagcctagcaacaccaaggtggacaagagagtggaacccaagagctgtggtaccacaacgccgggcgaaaggagttccttgccggccttttaccccggcacaagcggaagctgtagtgggtgtggaagcctcagcctcccacttcttgcgggcctcgtcgcggcagatgcagtagcttcacttcttattgtaggcgcggtatttctctgtgctcgaccaaggaggtcacccgctcaggaggatggtaaggtgtatataaatatgccaggacgcggaagctctagacgggttaagttttccagatccgcagacgcacccgcttaccaacaagggcagaaccaactctacaatgaacttaatttggggcggagggaagagtacgacgttctggacaaaaggaggggacgagatcccgagatgggcggaaagcctcagcgaaggaagaatccgcaagaggggctttataacgaactccagaaagataaaatggcagaagcctatagtgagattgggatgaagggagaaaggaggaggggtaaaggtcacgatgggttgtaccaaggattgagcacagccactaaagatacctatgatgcgctccacatgcaggccctgccgccaagacgcgccaagagaagcggatctggcgtgaagcagaccctgaatttcgacctgctgaagctggctggcgacgtggaatccaacccaggccctggccatatgtccgactccaaggaggtccctagccttccatttttgcgacacttgctcgaagagttggacagccatgaggacagcttgctgctgtttctgtgtcacgacgcggccccgggctgcacgacggtcacgcaagctttgtgctcgcttagccaacagcgcaagctgaccctcgcggctctggtcgagatgctctacgtgctgcagcgtatggatcttctcaagagccgcttcgggctcagcaaggagggggccgagcaattgctgggcacaagctttctcacgcgctaccgcaagctcatggtttgcgtgggtgaggagctcgactcgagcgagctacgcgctctacgcttgttcgcgtgcaacctgaatccgagcctgagcacggcgctttctgagagcagccgctttgtcgagcttgtactcgcgcttgaaaacgtaggactcgtctcgccatcgagtgtttccgtgcttgcggacatgttgcgcactcttcggcgcctcgatttgtgccagcagcttgttgagtacgaacaacaagagcaagccaggtaccgttactgttacgcggcctcgccctcattgccagttcgtacgttacgtcgggggcacggcgcgagtgaacacgagcagctgtgcatgcccgtgcaagaatcctctgacagccccgagctgctgcgcacgcccgtacaagaatcctccagcgacagccccgagcaaacgact

SEQ ID NO: 9385 - DNA, 3372 bp, Artificial Sequence
  Synthetic Polynucleotide
atggccttaccagtgaccgccttgctcctgccgctggccttgctgctccacgccgccaggccgaatgctggcgtgacccagacacctaagttccaggtgctgaaaaccggccagagcatgaccctgcaatgcgcccaggacatgaaccatgagtacatgagctggtacagacaggaccccggcatgggcctgagactgatccactactctgtggctatccagaccaccgaccagggcgaagtgcccaatggctacaacgtgtccagaagcaccatcgaggacttcccactgagactgctgtctgccgctcctagccagaccagcgtgtacttttgtgccagcagctacctgggcaacaccggcgagctgttttttggcgagggcagcagactgaccgtgctcgagggacagcctaaggccaatcctaccgtgacactgttccctccaagcagcgaagaactccaggccaacaaggccacacttgtgtgcctgatctccgacttctaccctggggctgtgacagtggcttggaaggccgatggatctcctgtgaaagccggcgtggaaaccaccaagccatccaagcagagcaacaacaaatacgccgccagctcctacctgagcctgacacctgagcagtggaagtcccacagatcctacagctgccaagtgacccacgaaggcagcaccgtggaaaagacagtggcccctacagagtgcagcggatccacaacacctggcgagagaagtagcctgcctgccttctatcctggcaccagcggctcttgttctggctgtggatctctgagcctgcctctgctggctggactggttgctgctgatgctgtggcctctctgctgattgtgggagccgtgttcctgtgcgccagacctagaagaagccccgctcaagaggacggcaaggtgtacatcaacatgcccggcagaggaagcactagtagagtgaagttcagcagaagcgccgacgcccctgcctaccagcagggacagaaccaactgtacaacgagctgaacctgggcagacgggaagagtacgacgtgctggacaagcggagaggcagggaccctgagatgggcggaaagccccagcggagaaagaacccccaggaaggactgtataacgaactccagaaagacaagatggccgaagcctacagcgagatcggcatgaagggcgagcggagaagaggcaagggccacgatggcctgtaccagggcctgagcaccgccaccaaggacacctatgacgccctgcacatgcaggccctgcctccaagaagggccaagcgatctggatctggagcaacaaacttctcactactcaaacaagcaggtgacgtggaggagaatcccgggcctatggactggatttggcgcatccttttccttgtcggcgctgctaccggcgcgcattccttcgaacaagaagtgacacagatccctgccgctctgtctgtgcctgagggcgaaaacctggtgctgaactgctccttcaccgacagcgccatctacaacctccagtggttcaggcaggaccctggaaagggactgacaagcctgctgctgatccagagcagccagagagagcagacctccggcagactgaatgccagcctggataagagcagcggcaggtctaccctgtatatcgccgcttctcagcctggcgatagcgccacatatctgtgtgctgtgcggcctacaagcggcggcagctacatccctacatttggcagaggcaccagcctgatcgtgcacccttatacgcgtgcctctacaaagggaccctccgtgtttcctctggctcccagcagcaagtctacaagcggaggaacagccgctctgggctgcctggtcaaggattactttcccgagcctgtgaccgtgtcctggaatagcggagcactgacaagcggcgtgcacacctttccagccgtgctgcaaagcagcggcctgtactctctgagcagcgtggtcacagtgcctagctctagcctgggcacccagacctacatctgcaatgtgaaccacaagcctagcaacaccaaggtggacaagagagtggaacccaagagctgtggtaccacaacgccgggcgaaaggagttccttgccggccttttaccccggcacaagcggaagctgtagtgggtgtggaagcctcagcctcccacttcttgcgggcctcgtcgcggcagatgcagtagcttcacttcttattgtaggcgcggtatttctctgtgctcgaccaaggaggtcacccgctcaggaggatggtaaggtgtatataaatatgccaggacgcggaagctctagacgggttaagttttccagatccgcagacgcacccgcttaccaacaagggcagaaccaactctacaatgaacttaatttggggcggagggaagagtacgacgttctggacaaaaggaggggacgagatcccgagatgggcggaaagcctcagcgaaggaagaatccgcaagaggggctttataacgaactccagaaagataaaatggcagaagcctatagtgagattgggatgaagggagaaaggaggaggggtaaaggtcacgatgggttgtaccaaggattgagcacagccactaaagatacctatgatgcgctccacatgcaggccctgccgccaagacgcgccaagagaagcggatctggcgtgaagcagaccctgaatttcgacctgctgaagctggctggcgacgtggaatccaacccaggccctggccatatgaccgagtacaagcccacggtgcgcctcgccacccgcgacgacgtccccagggccgtacgcaccctcgccgccgcgttcgccgactaccccgccacgcgccacaccgtcgatccggaccgccacatcgagcgggtcaccgagctgcaagaactcttcctcacgcgcgtcgggctcgacatcggcaaggtgtgggtcgcggacgacggcgccgcggtggcggtctggaccacgccggagagcgtcgaagcgggggcggtgttcgccgagatcggcccgcgcatggccgagttgagcggttcccggctggccgcgcagcaacagatggaaggcctcctggcgccgcaccggcccaaggagcccgcgtggttcctggccaccgtcggcgtctcgcccgaccaccagggcaagggtctgggcagcgccgtcgtgctccccggagtggaggcggccgagcgcgccggggtgcccgccttcctggagacctccgcgccccgcaacctccccttctacgagcggctcggcttcaccgtcaccgccgacgtcgaggtgcccgaaggaccgcgcacctggtgcatgacccgcaagcccggtgcctga

SEQ ID NO: 9386 - DNA, 3783 bp, Artificial Sequence
  Synthetic Polynucleotide
atggccttaccagtgaccgccttgctcctgccgctggccttgctgctccacgccgccaggccggaagtgcagctggttgaatctggcggaggactggttcaggctggcggatctctgagactgtcttgtgccgccagcggcagaacctttagcatgggctggtttagacaggcccctggcaaagagagagagttcgtcgccgccatcacatactctggcggcagcccttactacgccgactctgtgaagggcagattcaccatcagccgggacaacgccaagaacaccgtgtacctccagatgaacagcctgaagcctgaggacaccgccgtgtactactgcgccgccaatccaacatacggcagcgactggaacgccgagaattggggccagggaacccaagtgacagtgtctagcggtaccggcggaggcggatctggcggcggaggtagcggtggcggaggatctgaattcaatgctggcgtgacccagacacctaagttccaggtgctgaaaaccggccagagcatgaccctgcaatgcgcccaggacatgaaccatgagtacatgagctggtacagacaggaccccggcatgggcctgagactgatccactactctgtggctatccagaccaccgaccagggcgaagtgcccaatggctacaacgtgtccagaagcaccatcgaggacttcccactgagactgctgtctgccgctcctagccagaccagcgtgtacttttgtgccagcagctacctgggcaacaccggcgagctgttttttggcgagggcagcagactgaccgtgctcgagggacagcctaaggccaatcctaccgtgacactgttccctccaagcagcgaagaactccaggccaacaaggccacacttgtgtgcctgatctccgacttctaccctggggctgtgacagtggcttggaaggccgatggatctcctgtgaaagccggcgtggaaaccaccaagccatccaagcagagcaacaacaaatacgccgccagctcctacctgagcctgacacctgagcagtggaagtcccacagatcctacagctgccaagtgacccacgaaggcagcaccgtggaaaagacagtggcccctacagagtgcagcggatccacaacacctggcgagagaagtagcctgcctgccttctatcctggcaccagcggctcttgttctggctgtggatctctgagcctgcctctgctggctggactggttgctgctgatgctgtggcctctctgctgattgtgggagccgtgttcctgtgcgccagacctagaagaagccccgctcaagaggacggcaaggtgtacatcaacatgcccggcagaggaagcactagtagagtgaagttcagcagaagcgccgacgcccctgcctaccagcagggacagaaccaactgtacaacgagctgaacctgggcagacgggaagagtacgacgtgctggacaagcggagaggcagggaccctgagatgggcggaaagccccagcggagaaagaacccccaggaaggactgtataacgaactccagaaagacaagatggccgaagcctacagcgagatcggcatgaagggcgagcggagaagaggcaagggccacgatggcctgtaccagggcctgagcaccgccaccaaggacacctatgacgccctgcacatgcaggccctgcctccaagaagggccaagcgatctggatctggagcaacaaacttctcactactcaaacaagcaggtgacgtggaggagaatcccgggcctatggactggatttggcgcatccttttccttgtcggcgctgctaccggcgcgcattccttcgaacaagaagtgacacagatccctgccgctctgtctgtgcctgagggcgaaaacctggtgctgaactgctccttcaccgacagcgccatctacaacctccagtggttcaggcaggaccctggaaagggactgacaagcctgctgctgatccagagcagccagagagagcagacctccggcagactgaatgccagcctggataagagcagcggcaggtctaccctgtatatcgccgcttctcagcctggcgatagcgccacatatctgtgtgctgtgcggcctacaagcggcggcagctacatccctacatttggcagaggcaccagcctgatcgtgcacccttatacgcgtgcctctacaaagggaccctccgtgtttcctctggctcccagcagcaagtctacaagcggaggaacagccgctctgggctgcctggtcaaggattactttcccgagcctgtgaccgtgtcctggaatagcggagcactgacaagcggcgtgcacacctttccagccgtgctgcaaagcagcggcctgtactctctgagcagcgtggtcacagtgcctagctctagcctgggcacccagacctacatctgcaatgtgaaccacaagcctagcaacaccaaggtggacaagagagtggaacccaagagctgtggtaccacaacgccgggcgaaaggagttccttgccggccttttaccccggcacaagcggaagctgtagtgggtgtggaagcctcagcctcccacttcttgcgggcctcgtcgcggcagatgcagtagcttcacttcttattgtaggcgcggtatttctctgtgctcgaccaaggaggtcacccgctcaggaggatggtaaggtgtatataaatatgccaggacgcggaagctctagacgggttaagttttccagatccgcagacgcacccgcttaccaacaagggcagaaccaactctacaatgaacttaatttggggcggagggaagagtacgacgttctggacaaaaggaggggacgagatcccgagatgggcggaaagcctcagcgaaggaagaatccgcaagaggggctttataacgaactccagaaagataaaatggcagaagcctatagtgagattgggatgaagggagaaaggaggaggggtaaaggtcacgatgggttgtaccaaggattgagcacagccactaaagatacctatgatgcgctccacatgcaggccctgccgccaagacgcgccaagagaagcggatctggcgtgaagcagaccctgaatttcgacctgctgaagctggctggcgacgtggaatccaacccaggccctggccatatgaccgagtacaagcccacggtgcgcctcgccacccgcgacgacgtccccagggccgtacgcaccctcgccgccgcgttcgccgactaccccgccacgcgccacaccgtcgatccggaccgccacatcgagcgggtcaccgagctgcaagaactcttcctcacgcgcgtcgggctcgacatcggcaaggtgtgggtcgcggacgacggcgccgcggtggcggtctggaccacgccggagagcgtcgaagcgggggcggtgttcgccgagatcggcccgcgcatggccgagttgagcggttcccggctggccgcgcagcaacagatggaaggcctcctggcgccgcaccggcccaaggagcccgcgtggttcctggccaccgtcggcgtctcgcccgaccaccagggcaagggtctgggcagcgccgtcgtgctccccggagtggaggcggccgagcgcgccggggtgcccgccttcctggagacctccgcgccccgcaacctccccttctacgagcggctcggcttcaccgtcaccgccgacgtcgaggtgcccgaaggaccgcgcacctggtgcatgacccgcaagcccggtgcctga

SEQ ID NO: 9387 - DNA, 4194 bp, Artificial Sequence
  Synthetic Polynucleotide
atggccttaccagtgaccgccttgctcctgccgctggccttgctgctccacgccgccaggccggaagtgcagctggttgaatctggcggaggactggttcaggctggcggatctctgagactgtcttgtgccgccagcggcagaacctttagcatgggctggtttagacaggcccctggcaaagagagagagttcgtcgccgccatcacatactctggcggcagcccttactacgccgactctgtgaagggcagattcaccatcagccgggacaacgccaagaacaccgtgtacctccagatgaacagcctgaagcctgaggacaccgccgtgtactactgcgccgccaatccaacatacggcagcgactggaacgccgagaattggggccagggaacccaagtgacagtgtctagcggtaccggcggaggcggatctggcggcggaggtagcggtggcggaggatctgaattcaatgctggcgtgacccagacacctaagttccaggtgctgaaaaccggccagagcatgaccctgcaatgcgcccaggacatgaaccatgagtacatgagctggtacagacaggaccccggcatgggcctgagactgatccactactctgtggctatccagaccaccgaccagggcgaagtgcccaatggctacaacgtgtccagaagcaccatcgaggacttcccactgagactgctgtctgccgctcctagccagaccagcgtgtacttttgtgccagcagctacctgggcaacaccggcgagctgttttttggcgagggcagcagactgaccgtgctcgagggacagcctaaggccaatcctaccgtgacactgttccctccaagcagcgaagaactccaggccaacaaggccacacttgtgtgcctgatctccgacttctaccctggggctgtgacagtggcttggaaggccgatggatctcctgtgaaagccggcgtggaaaccaccaagccatccaagcagagcaacaacaaatacgccgccagctcctacctgagcctgacacctgagcagtggaagtcccacagatcctacagctgccaagtgacccacgaaggcagcaccgtggaaaagacagtggcccctacagagtgcagcggatccacaacacctggcgagagaagtagcctgcctgccttctatcctggcaccagcggctcttgttctggctgtggatctctgagcctgcctctgctggctggactggttgctgctgatgctgtggcctctctgctgattgtgggagccgtgttcctgtgcgccagacctagaagaagccccgctcaagaggacggcaaggtgtacatcaacatgcccggcagaggaagcactagtagagtgaagttcagcagaagcgccgacgcccctgcctaccagcagggacagaaccaactgtacaacgagctgaacctgggcagacgggaagagtacgacgtgctggacaagcggagaggcagggaccctgagatgggcggaaagccccagcggagaaagaacccccaggaaggactgtataacgaactccagaaagacaagatggccgaagcctacagcgagatcggcatgaagggcgagcggagaagaggcaagggccacgatggcctgtaccagggcctgagcaccgccaccaaggacacctatgacgccctgcacatgcaggccctgcctccaagaagggccaagcgatctggatctggagcaacaaacttctcactactcaaacaagcaggtgacgtggaggagaatcccgggcctatggactggatttggcgcatccttttccttgtcggcgctgctaccggcgcgcattccgggcccgaagtgcaactggttgaatccggtggcggcctggtgcaagcaggcggatctctcagacttagctgtgccgcctccggcagaaccttcacaatgggatggtttaggcaggctccagggaaagagagagagttcgtcgccgccatctctctgtctcccacactggcctactacgccgactctgtgaaaggccggttcaccatctccagagataatgccaagaacaccgtggtgctgcaaatgaactctctgaaacccgaggatacagccctgtactattgtgccgctgaccggaagtccgtgatgagcatcagacccgattactggggacagggcacacaagtcacagtgtcctctggatccggcggcggaggatctggcggaggcggatctgggggcggaggctctttcgaacaagaagtgacacagatccctgccgctctgtctgtgcctgagggcgaaaacctggtgctgaactgctccttcaccgacagcgccatctacaacctccagtggttcaggcaggaccctggaaagggactgacaagcctgctgctgatccagagcagccagagagagcagacctccggcagactgaatgccagcctggataagagcagcggcaggtctaccctgtatatcgccgcttctcagcctggcgatagcgccacatatctgtgtgctgtgcggcctacaagcggcggcagctacatccctacatttggcagaggcaccagcctgatcgtgcacccttatacgcgtgcctctacaaagggaccctccgtgtttcctctggctcccagcagcaagtctacaagcggaggaacagccgctctgggctgcctggtcaaggattactttcccgagcctgtgaccgtgtcctggaatagcggagcactgacaagcggcgtgcacacctttccagccgtgctgcaaagcagcggcctgtactctctgagcagcgtggtcacagtgcctagctctagcctgggcacccagacctacatctgcaatgtgaaccacaagcctagcaacaccaaggtggacaagagagtggaacccaagagctgtggtaccacaacgccgggcgaaaggagttccttgccggccttttaccccggcacaagcggaagctgtagtgggtgtggaagcctcagcctcccacttcttgcgggcctcgtcgcggcagatgcagtagcttcacttcttattgtaggcgcggtatttctctgtgctcgaccaaggaggtcacccgctcaggaggatggtaaggtgtatataaatatgccaggacgcggaagctctagacgggttaagttttccagatccgcagacgcacccgcttaccaacaagggcagaaccaactctacaatgaacttaatttggggcggagggaagagtacgacgttctggacaaaaggaggggacgagatcccgagatgggcggaaagcctcagcgaaggaagaatccgcaagaggggctttataacgaactccagaaagataaaatggcagaagcctatagtgagattgggatgaagggagaaaggaggaggggtaaaggtcacgatgggttgtaccaaggattgagcacagccactaaagatacctatgatgcgctccacatgcaggccctgccgccaagacgcgccaagagaagcggatctggcgtgaagcagaccctgaatttcgacctgctgaagctggctggcgacgtggaatccaacccaggccctggccatatgaccgagtacaagcccacggtgcgcctcgccacccgcgacgacgtccccagggccgtacgcaccctcgccgccgcgttcgccgactaccccgccacgcgccacaccgtcgatccggaccgccacatcgagcgggtcaccgagctgcaagaactcttcctcacgcgcgtcgggctcgacatcggcaaggtgtgggtcgcggacgacggcgccgcggtggcggtctggaccacgccggagagcgtcgaagcgggggcggtgttcgccgagatcggcccgcgcatggccgagttgagcggttcccggctggccgcgcagcaacagatggaaggcctcctggcgccgcaccggcccaaggagcccgcgtggttcctggccaccgtcggcgtctcgcccgaccaccagggcaagggtctgggcagcgccgtcgtgctccccggagtggaggcggccgagcgcgccggggtgcccgccttcctggagacctccgcgccccgcaacctccccttctacgagcggctcggcttcaccgtcaccgccgacgtcgaggtgcccgaaggaccgcgcacctggtgcatgacccgcaagcccggtgcctga

SEQ ID NO: 9388 - DNA, 2454 bp, Artificial Sequence; identical to SEQ ID NO: 9355
  Synthetic Polynucleotide

SEQ ID NO: 9389 - DNA, 2580 bp, Artificial Sequence
  Synthetic Polynucleotide
atggccttaccagtgaccgccttgctcctgccgctggccttgctgctccacgccgccaggccggaattcaatgctggcgtgacccagacacctaagttccaggtgctgaaaaccggccagagcatgaccctgcaatgcgcccaggacatgaaccatgagtacatgagctggtacagacaggaccccggcatgggcctgagactgatccactactctgtggctatccagaccaccgaccagggcgaagtgcccaatggctacaacgtgtccagaagcaccatcgaggacttcccactgagactgctgtctgccgctcctagccagaccagcgtgtacttttgtgccagcagctacctgggcaacaccggcgagctgttttttggcgagggcagcagactgaccgtgctcgaggacctgaagaacgtgttcccacctgaggtggccgtgttcgagcctagcgaggccgagatcagccacacccagaaagccaccctcgtgtgcctggctaccggcttctaccccgaccatgtggaactgtcttggtgggtcaacggcaaagaggtgcacagcggcgtgtctaccgacccccagccactgaaagaacagcccgccctgaacgacagccggtactgcctgagcagcagactgagagtgtccgccaccttctggcagaacccccggaaccacttcagatgccaggtgcagttctacggcctgagcgagaacgacgagtggacccaggacagagccaagcccgtgacccagatcgtgtctgccgaagcctggggcagagccgattgcggatcccagagcttcggcctgctggaccccaagctgtgctacctgctggatggcatcctgttcatctacggcgtgatcctgaccgccctgttcctgagagtgaagttcagcagaagcgccgacgcccctgcctaccagcagggacagaaccaactgtacaacgagctgaacctgggcagacgggaagagtacgacgtgctggacaagcggagaggcagggaccctgagatgggcggaaagccccagcggagaaagaacccccaggaaggactgtataacgaactccagaaagacaagatggccgaagcctacagcgagatcggcatgaagggcgagcggagaagaggcaagggccacgatggcctgtaccagggcctgagcaccgccaccaaggacacctatgacgccctgcacatgcaggccctgcctccaagaagggccaagcgatctggatctggagcaacaaacttctcactactcaaacaagcaggtgacgtggaggagaatcccgggcctactagtatggactggatttggcgcatccttttccttgtcggcgctgctaccggcgcgcattccttcgaacaagaagtgacacagatccctgccgctctgtctgtgcctgagggcgaaaacctggtgctgaactgctccttcaccgacagcgccatctacaacctccagtggttcaggcaggaccctggaaagggactgacaagcctgctgctgatccagagcagccagagagagcagacctccggcagactgaatgccagcctggataagagcagcggcaggtctaccctgtatatcgccgcttctcagcctggcgatagcgccacatatctgtgtgctgtgcggcctacaagcggcggcagctacatccctacatttggcagaggcaccagcctgatcgtgcacccttatacgcgtatccagaaccctgatcctgccgtgtaccagctgcgggatagcaagagcagcgacaagagcgtgtgtctgttcaccgacttcgacagccagaccaacgtgtcccagagcaaggactccgacgtgtacatcaccgataagaccgtgctggacatgcggagcatggacttcaagagcaactccgccgtggcctggtccaacaagtccgatttcgcctgcgccaacgccttcaacaacagcattatccccgaggacacattcttcccaagccccgagagcagctgcggtacccagagcttcggcctgctggaccccaagctgtgctacctgctggatggcatcctgttcatctacggcgtgatcctgaccgccctgttcctgaaacggggcagaaagaaactcctgtatatattcaaacaaccatttatgagaccagtacaaactactcaagaggaagatggctgtagctgccgatttccagaagaagaagaaggaggatgtgaactgagagtgaagttcagcagaagcgccgacgcccctgcctaccagcagggacagaaccaactgtacaacgagctgaacctgggcagacgggaagagtacgacgtgctggacaagcggagaggcagggaccctgagatgggcggaaagccccagcggagaaagaacccccaggaaggactgtataacgaactccagaaagacaagatggccgaagcctacagcgagatcggcatgaagggcgagcggagaagaggcaagggccacgatggcctgtaccagggcctgagcaccgccaccaaggacacctatgacgccctgcacatgcaggccctgcctccaagataa

SEQ ID NO: 9390 - DNA, 2577 bp, Artificial Sequence
  Synthetic Polynucleotide
atggccttaccagtgaccgccttgctcctgccgctggccttgctgctccacgccgccaggccggaattcaatgctggcgtgacccagacacctaagttccaggtgctgaaaaccggccagagcatgaccctgcaatgcgcccaggacatgaaccatgagtacatgagctggtacagacaggaccccggcatgggcctgagactgatccactactctgtggctatccagaccaccgaccagggcgaagtgcccaatggctacaacgtgtccagaagcaccatcgaggacttcccactgagactgctgtctgccgctcctagccagaccagcgtgtacttttgtgccagcagctacctgggcaacaccggcgagctgttttttggcgagggcagcagactgaccgtgctcgaggacctgaagaacgtgttcccacctgaggtggccgtgttcgagcctagcgaggccgagatcagccacacccagaaagccaccctcgtgtgcctggctaccggcttctaccccgaccatgtggaactgtcttggtgggtcaacggcaaagaggtgcacagcggcgtgtctaccgacccccagccactgaaagaacagcccgccctgaacgacagccggtactgcctgagcagcagactgagagtgtccgccaccttctggcagaacccccggaaccacttcagatgccaggtgcagttctacggcctgagcgagaacgacgagtggacccaggacagagccaagcccgtgacccagatcgtgtctgccgaagcctggggcagagccgattgcggatcccagagcttcggcctgctggaccccaagctgtgctacctgctggatggcatcctgttcatctacggcgtgatcctgaccgccctgttcctgagagtgaagttcagcagaagcgccgacgcccctgcctaccagcagggacagaaccaactgtacaacgagctgaacctgggcagacgggaagagtacgacgtgctggacaagcggagaggcagggaccctgagatgggcggaaagccccagcggagaaagaacccccaggaaggactgtataacgaactccagaaagacaagatggccgaagcctacagcgagatcggcatgaagggcgagcggagaagaggcaagggccacgatggcctgtaccagggcctgagcaccgccaccaaggacacctatgacgccctgcacatgcaggccctgcctccaagaagggccaagcgatctggatctggagcaacaaacttctcactactcaaacaagcaggtgacgtggaggagaatcccgggcctactagtatggactggatttggcgcatccttttccttgtcggcgctgctaccggcgcgcattccttcgaacaagaagtgacacagatccctgccgctctgtctgtgcctgagggcgaaaacctggtgctgaactgctccttcaccgacagcgccatctacaacctccagtggttcaggcaggaccctggaaagggactgacaagcctgctgctgatccagagcagccagagagagcagacctccggcagactgaatgccagcctggataagagcagcggcaggtctaccctgtatatcgccgcttctcagcctggcgatagcgccacatatctgtgtgctgtgcggcctacaagcggcggcagctacatccctacatttggcagaggcaccagcctgatcgtgcacccttatacgcgtatccagaaccctgatcctgccgtgtaccagctgcgggatagcaagagcagcgacaagagcgtgtgtctgttcaccgacttcgacagccagaccaacgtgtcccagagcaaggactccgacgtgtacatcaccgataagaccgtgctggacatgcggagcatggacttcaagagcaactccgccgtggcctggtccaacaagtccgatttcgcctgcgccaacgccttcaacaacagcattatccccgaggacacattcttcccaagccccgagagcagctgcggtacccagagcttcggcctgctggaccccaagctgtgctacctgctggatggcatcctgttcatctacggcgtgatcctgaccgccctgttcctgaggagtaagaggagcaggctcctgcacagtgactacatgaacatgactccacgccgccccggacccacccgcaagcattaccagccctatgccccaccacgcgacttcgcagcctatcgctccagagtgaagttcagcagaagcgccgacgcccctgcctaccagcagggacagaaccaactgtacaacgagctgaacctgggcagacgggaagagtacgacgtgctggacaagcggagaggcagggaccctgagatgggcggaaagccccagcggagaaagaacccccaggaaggactgtataacgaactccagaaagacaagatggccgaagcctacagcgagatcggcatgaagggcgagcggagaagaggcaagggccacgatggcctgtaccagggcctgagcaccgccaccaaggacacctatgacgccctgcacatgcaggccctgcctccaagataa

SEQ ID NO: 9391 - DNA, 2562 bp, Artificial Sequence
  Synthetic Polynucleotide
atggccttaccagtgaccgccttgctcctgccgctggccttgctgctccacgccgccaggccggaattcaatgctggcgtgacccagacacctaagttccaggtgctgaaaaccggccagagcatgaccctgcaatgcgcccaggacatgaaccatgagtacatgagctggtacagacaggaccccggcatgggcctgagactgatccactactctgtggctatccagaccaccgaccagggcgaagtgcccaatggctacaacgtgtccagaagcaccatcgaggacttcccactgagactgctgtctgccgctcctagccagaccagcgtgtacttttgtgccagcagctacctgggcaacaccggcgagctgttttttggcgagggcagcagactgaccgtgctcgaggacctgaagaacgtgttcccacctgaggtggccgtgttcgagcctagcgaggccgagatcagccacacccagaaagccaccctcgtgtgcctggctaccggcttctaccccgaccatgtggaactgtcttggtgggtcaacggcaaagaggtgcacagcggcgtgtctaccgacccccagccactgaaagaacagcccgccctgaacgacagccggtactgcctgagcagcagactgagagtgtccgccaccttctggcagaacccccggaaccacttcagatgccaggtgcagttctacggcctgagcgagaacgacgagtggacccaggacagagccaagcccgtgacccagatcgtgtctgccgaagcctggggcagagccgattgcggatcccagagcttcggcctgctggaccccaagctgtgctacctgctggatggcatcctgttcatctacggcgtgatcctgaccgccctgttcctgagagtgaagttcagcagaagcgccgacgcccctgcctaccagcagggacagaaccaactgtacaacgagctgaacctgggcagacgggaagagtacgacgtgctggacaagcggagaggcagggaccctgagatgggcggaaagccccagcggagaaagaacccccaggaaggactgtataacgaactccagaaagacaagatggccgaagcctacagcgagatcggcatgaagggcgagcggagaagaggcaagggccacgatggcctgtaccagggcctgagcaccgccaccaaggacacctatgacgccctgcacatgcaggccctgcctccaagaagggccaagcgatctggatctggagcaacaaacttctcactactcaaacaagcaggtgacgtggaggagaatcccgggcctactagtatggactggatttggcgcatccttttccttgtcggcgctgctaccggcgcgcattccttcgaacaagaagtgacacagatccctgccgctctgtctgtgcctgagggcgaaaacctggtgctgaactgctccttcaccgacagcgccatctacaacctccagtggttcaggcaggaccctggaaagggactgacaagcctgctgctgatccagagcagccagagagagcagacctccggcagactgaatgccagcctggataagagcagcggcaggtctaccctgtatatcgccgcttctcagcctggcgatagcgccacatatctgtgtgctgtgcggcctacaagcggcggcagctacatccctacatttggcagaggcaccagcctgatcgtgcacccttatacgcgtatccagaaccctgatcctgccgtgtaccagctgcgggatagcaagagcagcgacaagagcgtgtgtctgttcaccgacttcgacagccagaccaacgtgtcccagagcaaggactccgacgtgtacatcaccgataagaccgtgctggacatgcggagcatggacttcaagagcaactccgccgtggcctggtccaacaagtccgatttcgcctgcgccaacgccttcaacaacagcattatccccgaggacacattcttcccaagccccgagagcagctgcggtacccagagcttcggcctgctggaccccaagctgtgctacctgctggatggcatcctgttcatctacggcgtgatcctgaccgccctgttcctgagggaccaaagactgcctcctgacgctcacaaacctccaggcggaggcagcttcagaacccctatccaagaggaacaggctgacgcccacagcaccctggcaaaaattagagtgaagttcagcagaagcgccgacgcccctgcctaccagcagggacagaaccaactgtacaacgagctgaacctgggcagacgggaagagtacgacgtgctggacaagcggagaggcagggaccctgagatgggcggaaagccccagcggagaaagaacccccaggaaggactgtataacgaactccagaaagacaagatggccgaagcctacagcgagatcggcatgaagggcgagcggagaagaggcaagggccacgatggcctgtaccagggcctgagcaccgccaccaaggacacctatgacgccctgcacatgcaggccctgcctccaagataa

SEQ ID NO: 9392 - DNA, 2814 bp, Artificial Sequence
  Synthetic Polynucleotide
atggccttaccagtgaccgccttgctcctgccgctggccttgctgctccacgccgccaggccggaattcaatgctggcgtgacccagacacctaagttccaggtgctgaaaaccggccagagcatgaccctgcaatgcgcccaggacatgaaccatgagtacatgagctggtacagacaggaccccggcatgggcctgagactgatccactactctgtggctatccagaccaccgaccagggcgaagtgcccaatggctacaacgtgtccagaagcaccatcgaggacttcccactgagactgctgtctgccgctcctagccagaccagcgtgtacttttgtgccagcagctacctgggcaacaccggcgagctgttttttggcgagggcagcagactgaccgtgctcgaggacctgaagaacgtgttcccacctgaggtggccgtgttcgagcctagcgaggccgagatcagccacacccagaaagccaccctcgtgtgcctggctaccggcttctaccccgaccatgtggaactgtcttggtgggtcaacggcaaagaggtgcacagcggcgtgtctaccgacccccagccactgaaagaacagcccgccctgaacgacagccggtactgcctgagcagcagactgagagtgtccgccaccttctggcagaacccccggaaccacttcagatgccaggtgcagttctacggcctgagcgagaacgacgagtggacccaggacagagccaagcccgtgacccagatcgtgtctgccgaagcctggggcagagccgattgcggatcccagagcttcggcctgctggaccccaagctgtgctacctgctggatggcatcctgttcatctacggcgtgatcctgaccgccctgttcctgagagtgaagttcagcagaagcgccgacgcccctgcctaccagcagggacagaaccaactgtacaacgagctgaacctgggcagacgggaagagtacgacgtgctggacaagcggagaggcagggaccctgagatgggcggaaagccccagcggagaaagaacccccaggaaggactgtataacgaactccagaaagacaagatggccgaagcctacagcgagatcggcatgaagggcgagcggagaagaggcaagggccacgatggcctgtaccagggcctgagcaccgccaccaaggacacctatgacgccctgcacatgcaggccctgcctccaagaagggccaagcgatctggatctggagcaacaaacttctcactactcaaacaagcaggtgacgtggaggagaatcccgggcctactagtatggactggatttggcgcatccttttccttgtcggcgctgctaccggcgcgcattccttcgaacaagaagtgacacagatccctgccgctctgtctgtgcctgagggcgaaaacctggtgctgaactgctccttcaccgacagcgccatctacaacctccagtggttcaggcaggaccctggaaagggactgacaagcctgctgctgatccagagcagccagagagagcagacctccggcagactgaatgccagcctggataagagcagcggcaggtctaccctgtatatcgccgcttctcagcctggcgatagcgccacatatctgtgtgctgtgcggcctacaagcggcggcagctacatccctacatttggcagaggcaccagcctgatcgtgcacccttatacgcgtatccagaaccctgatcctgccgtgtaccagctgcgggatagcaagagcagcgacaagagcgtgtgtctgttcaccgacttcgacagccagaccaacgtgtcccagagcaaggactccgacgtgtacatcaccgataagaccgtgctggacatgcggagcatggacttcaagagcaactccgccgtggcctggtccaacaagtccgatttcgcctgcgccaacgccttcaacaacagcattatccccgaggacacattcttcccaagccccgagagcagctgcggtacccagagcttcggcctgctggaccccaagctgtgctacctgctggatggcatcctgttcatctacggcgtgatcctgaccgccctgttcctgtggcggcggaagcggaaagagaagcagtctgagacaagccccaaagagttcctgaccatctacgaggacgtgaaggacctgaaaacccggcggaaccacgaacaagagcagacctttcctggcggaggcagcaccatctacagcatgatccagagccagagcagcgcccctacaagccaagagcctgcctacacactgtactccctgatccagcctagcagaaagagcggcagccggaagagaaatcacagccccagcttcaacagcacgatctacgaagtgatcggcaagagccagccaaaggctcagaaccctgccagactgagccggaaagagctggaaaacttcgacgtgtacagcagagtgaagttcagcagaagcgccgacgcccctgcctaccagcagggacagaaccaactgtacaacgagctgaacctgggcagacgggaagagtacgacgtgctggacaagcggagaggcagggaccctgagatgggcggaaagccccagcggagaaagaacccccaggaaggactgtataacgaactccagaaagacaagatggccgaagcctacagcgagatcggcatgaagggcgagcggagaagaggcaagggccacgatggcctgtaccagggcctgagcaccgccaccaaggacacctatgacgccctgcacatgcaggccctgcctccaagataa

SEQ ID NO: 9393 - DNA, 2703 bp, Artificial Sequence
  Synthetic Polynucleotide
atggccttaccagtgaccgccttgctcctgccgctggccttgctgctccacgccgccaggccggaattcaatgctggcgtgacccagacacctaagttccaggtgctgaaaaccggccagagcatgaccctgcaatgcgcccaggacatgaaccatgagtacatgagctggtacagacaggaccccggcatgggcctgagactgatccactactctgtggctatccagaccaccgaccagggcgaagtgcccaatggctacaacgtgtccagaagcaccatcgaggacttcccactgagactgctgtctgccgctcctagccagaccagcgtgtacttttgtgccagcagctacctgggcaacaccggcgagctgttttttggcgagggcagcagactgaccgtgctcgaggacctgaagaacgtgttcccacctgaggtggccgtgttcgagcctagcgaggccgagatcagccacacccagaaagccaccctcgtgtgcctggctaccggcttctaccccgaccatgtggaactgtcttggtgggtcaacggcaaagaggtgcacagcggcgtgtctaccgacccccagccactgaaagaacagcccgccctgaacgacagccggtactgcctgagcagcagactgagagtgtccgccaccttctggcagaacccccggaaccacttcagatgccaggtgcagttctacggcctgagcgagaacgacgagtggacccaggacagagccaagcccgtgacccagatcgtgtctgccgaagcctggggcagagccgattgcggatcccagagcttcggcctgctggaccccaagctgtgctacctgctggatggcatcctgttcatctacggcgtgatcctgaccgccctgttcctgaggagtaagaggagcaggctcctgcacagtgactacatgaacatgactccacgccgccccggacccacccgcaagcattaccagccctatgccccaccacgcgacttcgcagcctatcgctccagagtgaagttcagcagaagcgccgacgcccctgcctaccagcagggacagaaccaactgtacaacgagctgaacctgggcagacgggaagagtacgacgtgctggacaagcggagaggcagggaccctgagatgggcggaaagccccagcggagaaagaacccccaggaaggactgtataacgaactccagaaagacaagatggccgaagcctacagcgagatcggcatgaagggcgagcggagaagaggcaagggccacgatggcctgtaccagggcctgagcaccgccaccaaggacacctatgacgccctgcacatgcaggccctgcctccaagaagggccaagcgatctggatctggagcaacaaacttctcactactcaaacaagcaggtgacgtggaggagaatcccgggcctactagtatggactggatttggcgcatccttttccttgtcggcgctgctaccggcgcgcattccttcgaacaagaagtgacacagatccctgccgctctgtctgtgcctgagggcgaaaacctggtgctgaactgctccttcaccgacagcgccatctacaacctccagtggttcaggcaggaccctggaaagggactgacaagcctgctgctgatccagagcagccagagagagcagacctccggcagactgaatgccagcctggataagagcagcggcaggtctaccctgtatatcgccgcttctcagcctggcgatagcgccacatatctgtgtgctgtgcggcctacaagcggcggcagctacatccctacatttggcagaggcaccagcctgatcgtgcacccttatacgcgtatccagaaccctgatcctgccgtgtaccagctgcgggatagcaagagcagcgacaagagcgtgtgtctgttcaccgacttcgacagccagaccaacgtgtcccagagcaaggactccgacgtgtacatcaccgataagaccgtgctggacatgcggagcatggacttcaagagcaactccgccgtggcctggtccaacaagtccgatttcgcctgcgccaacgccttcaacaacagcattatccccgaggacacattcttcccaagccccgagagcagctgcggtacccagagcttcggcctgctggaccccaagctgtgctacctgctggatggcatcctgttcatctacggcgtgatcctgaccgccctgttcctgaaacggggcagaaagaaactcctgtatatattcaaacaaccatttatgagaccagtacaaactactcaagaggaagatggctgtagctgccgatttccagaagaagaagaaggaggatgtgaactgagagtgaagttcagcagaagcgccgacgcccctgcctaccagcagggacagaaccaactgtacaacgagctgaacctgggcagacgggaagagtacgacgtgctggacaagcggagaggcagggaccctgagatgggcggaaagccccagcggagaaagaacccccaggaaggactgtataacgaactccagaaagacaagatggccgaagcctacagcgagatcggcatgaagggcgagcggagaagaggcaagggccacgatggcctgtaccagggcctgagcaccgccaccaaggacacctatgacgccctgcacatgcaggccctgcctccaagataa

SEQ ID NO: 9394 - DNA, 2700 bp, Artificial Sequence
  Synthetic Polynucleotide
atggccttaccagtgaccgccttgctcctgccgctggccttgctgctccacgccgccaggccggaattcaatgctggcgtgacccagacacctaagttccaggtgctgaaaaccggccagagcatgaccctgcaatgcgcccaggacatgaaccatgagtacatgagctggtacagacaggaccccggcatgggcctgagactgatccactactctgtggctatccagaccaccgaccagggcgaagtgcccaatggctacaacgtgtccagaagcaccatcgaggacttcccactgagactgctgtctgccgctcctagccagaccagcgtgtacttttgtgccagcagctacctgggcaacaccggcgagctgttttttggcgagggcagcagactgaccgtgctcgaggacctgaagaacgtgttcccacctgaggtggccgtgttcgagcctagcgaggccgagatcagccacacccagaaagccaccctcgtgtgcctggctaccggcttctaccccgaccatgtggaactgtcttggtgggtcaacggcaaagaggtgcacagcggcgtgtctaccgacccccagccactgaaagaacagcccgccctgaacgacagccggtactgcctgagcagcagactgagagtgtccgccaccttctggcagaacccccggaaccacttcagatgccaggtgcagttctacggcctgagcgagaacgacgagtggacccaggacagagccaagcccgtgacccagatcgtgtctgccgaagcctggggcagagccgattgcggatcccagagcttcggcctgctggaccccaagctgtgctacctgctggatggcatcctgttcatctacggcgtgatcctgaccgccctgttcctgaggagtaagaggagcaggctcctgcacagtgactacatgaacatgactccacgccgccccggacccacccgcaagcattaccagccctatgccccaccacgcgacttcgcagcctatcgctccagagtgaagttcagcagaagcgccgacgcccctgcctaccagcagggacagaaccaactgtacaacgagctgaacctgggcagacgggaagagtacgacgtgctggacaagcggagaggcagggaccctgagatgggcggaaagccccagcggagaaagaacccccaggaaggactgtataacgaactccagaaagacaagatggccgaagcctacagcgagatcggcatgaagggcgagcggagaagaggcaagggccacgatggcctgtaccagggcctgagcaccgccaccaaggacacctatgacgccctgcacatgcaggccctgcctccaagaagggccaagcgatctggatctggagcaacaaacttctcactactcaaacaagcaggtgacgtggaggagaatcccgggcctactagtatggactggatttggcgcatccttttccttgtcggcgctgctaccggcgcgcattccttcgaacaagaagtgacacagatccctgccgctctgtctgtgcctgagggcgaaaacctggtgctgaactgctccttcaccgacagcgccatctacaacctccagtggttcaggcaggaccctggaaagggactgacaagcctgctgctgatccagagcagccagagagagcagacctccggcagactgaatgccagcctggataagagcagcggcaggtctaccctgtatatcgccgcttctcagcctggcgatagcgccacatatctgtgtgctgtgcggcctacaagcggcggcagctacatccctacatttggcagaggcaccagcctgatcgtgcacccttatacgcgtatccagaaccctgatcctgccgtgtaccagctgcgggatagcaagagcagcgacaagagcgtgtgtctgttcaccgacttcgacagccagaccaacgtgtcccagagcaaggactccgacgtgtacatcaccgataagaccgtgctggacatgcggagcatggacttcaagagcaactccgccgtggcctggtccaacaagtccgatttcgcctgcgccaacgccttcaacaacagcattatccccgaggacacattcttcccaagccccgagagcagctgcggtacccagagttttgggttgttggaccctaaattgtgctatctgttggacggaatcctgttcatttacggagtgatcctgaccgcattgttcctgaggagcaagcggtcacggctgctccacagcgattacatgaatatgacaccacgaagaccgggtcctactcgcaaacactaccaaccctacgcacctccccgcgactttgcagcgtaccgatctcgggttaagttttccagatccgcagacgcacccgcttaccaacaagggcagaaccaactctacaatgaacttaatttggggcggagggaagagtacgacgttctggacaaaaggaggggacgagatcccgagatgggcggaaagcctcagcgaaggaagaatccgcaagaggggctttataacgaactccagaaagataaaatggcagaagcctatagtgagattgggatgaagggagaaaggaggaggggtaaaggtcacgatgggttgtaccaaggattgagcacagccactaaagatacctatgatgcgctccacatgcaggccctgccgccaagataa

SEQ ID NO: 9395 - DNA, 2703 bp, Artificial Sequence
  Synthetic Polynucleotide
atggccttaccagtgaccgccttgctcctgccgctggccttgctgctccacgccgccaggccggaattcaatgctggcgtgacccagacacctaagttccaggtgctgaaaaccggccagagcatgaccctgcaatgcgcccaggacatgaaccatgagtacatgagctggtacagacaggaccccggcatgggcctgagactgatccactactctgtggctatccagaccaccgaccagggcgaagtgcccaatggctacaacgtgtccagaagcaccatcgaggacttcccactgagactgctgtctgccgctcctagccagaccagcgtgtacttttgtgccagcagctacctgggcaacaccggcgagctgttttttggcgagggcagcagactgaccgtgctcgaggacctgaagaacgtgttcccacctgaggtggccgtgttcgagcctagcgaggccgagatcagccacacccagaaagccaccctcgtgtgcctggctaccggcttctaccccgaccatgtggaactgtcttggtgggtcaacggcaaagaggtgcacagcggcgtgtctaccgacccccagccactgaaagaacagcccgccctgaacgacagccggtactgcctgagcagcagactgagagtgtccgccaccttctggcagaacccccggaaccacttcagatgccaggtgcagttctacggcctgagcgagaacgacgagtggacccaggacagagccaagcccgtgacccagatcgtgtctgccgaagcctggggcagagccgattgcggatcccagagcttcggcctgctggaccccaagctgtgctacctgctggatggcatcctgttcatctacggcgtgatcctgaccgccctgttcctgaggagtaagaggagcaggctcctgcacagtgactacatgaacatgactccacgccgccccggacccacccgcaagcattaccagccctatgccccaccacgcgacttcgcagcctatcgctccagagtgaagttcagcagaagcgccgacgcccctgcctaccagcagggacagaaccaactgtacaacgagctgaacctgggcagacgggaagagtacgacgtgctggacaagcggagaggcagggaccctgagatgggcggaaagccccagcggagaaagaacccccaggaaggactgtataacgaactccagaaagacaagatggccgaagcctacagcgagatcggcatgaagggcgagcggagaagaggcaagggccacgatggcctgtaccagggcctgagcaccgccaccaaggacacctatgacgccctgcacatgcaggccctgcctccaagaagggccaagcgatctggatctggagcaacaaacttctcactactcaaacaagcaggtgacgtggaggagaatcccgggcctactagtatggactggatttggcgcatccttttccttgtcggcgctgctaccggcgcgcattccttcgaacaagaagtgacacagatccctgccgctctgtctgtgcctgagggcgaaaacctggtgctgaactgctccttcaccgacagcgccatctacaacctccagtggttcaggcaggaccctggaaagggactgacaagcctgctgctgatccagagcagccagagagagcagacctccggcagactgaatgccagcctggataagagcagcggcaggtctaccctgtatatcgccgcttctcagcctggcgatagcgccacatatctgtgtgctgtgcggcctacaagcggcggcagctacatccctacatttggcagaggcaccagcctgatcgtgcacccttatacgcgtatccagaaccctgatcctgccgtgtaccagctgcgggatagcaagagcagcgacaagagcgtgtgtctgttcaccgacttcgacagccagaccaacgtgtcccagagcaaggactccgacgtgtacatcaccgataagaccgtgctggacatgcggagcatggacttcaagagcaactccgccgtggcctggtccaacaagtccgatttcgcctgcgccaacgccttcaacaacagcattatccccgaggacacattcttcccaagccccgagagcagctgcggtacccagagttttgggttgttggaccctaaattgtgctatctgttggacggaatcctgttcatttacggagtgatcctgaccgcattgttcctgaagagaggccggaagaagctgctgtacatcttcaagcagcctttcatgcggcccgtgcagaccacccaggaagaggacggctgctcctgccggttccccgaggaagaagaaggcggctgcgagctgcgggttaagttttccagatccgcagacgcacccgcttaccaacaagggcagaaccaactctacaatgaacttaatttggggcggagggaagagtacgacgttctggacaaaaggaggggacgagatcccgagatgggcggaaagcctcagcgaaggaagaatccgcaagaggggctttataacgaactccagaaagataaaatggcagaagcctatagtgagattgggatgaagggagaaaggaggaggggtaaaggtcacgatgggttgtaccaaggattgagcacagccactaaagatacctatgatgcgctccacatgcaggccctgccgccaagataa

SEQ ID NO: 9396 - DNA, 2454 bp, Artificial Sequence
  Synthetic Polynucleotide
atggccttaccagtgaccgccttgctcctgccgctggccttgctgctccacgccgccaggccggaattcaatgctggcgtgacccagacacctaagttccaggtgctgaaaaccggccagagcatgaccctgcaatgcgcccaggacatgaaccatgagtacatgagctggtacagacaggaccccggcatgggcctgagactgatccactactctgtggctatccagaccaccgaccagggcgaagtgcccaatggctacaacgtgtccagaagcaccatcgaggacttcccactgagactgctgtctgccgctcctagccagaccagcgtgtacttttgtgccagcagctacctgggcaacaccggcgagctgttttttggcgagggcagcagactgaccgtgctcgaggacctgaagaacgtgttcccacctgaggtggccgtgttcgagcctagcgaggccgagatcagccacacccagaaagccaccctcgtgtgcctggctaccggcttctaccccgaccatgtggaactgtcttggtgggtcaacggcaaagaggtgcacagcggcgtgtctaccgacccccagccactgaaagaacagcccgccctgaacgacagccggtactgcctgagcagcagactgagagtgtccgccaccttctggcagaacccccggaaccacttcagatgccaggtgcagttctacggcctgagcgagaacgacgagtggacccaggacagagccaagcccgtgacccagatcgtgtctgccgaagcctggggcagagccgattgcggatcccagagcttcggcctgctggaccccaagctgtgctacctgctggatggcatcctgttcatctacggcgtgatcctgaccgccctgttcctgagagtgaagttcagcagaagcgccgacgcccctgcctaccagcagggacagaaccaactgtacaacgagctgaacctgggcagacgggaagagtacgacgtgctggacaagcggagaggcagggaccctgagatgggcggaaagccccagcggagaaagaacccccaggaaggactgttcaacgaactccagaaagacaagatggccgaagccttcagcgagatcggcatgaagggcgagcggagaagaggcaagggccacgatggcctgttccagggcctgagcaccgccaccaaggacaccttcgacgccctgcacatgcaggccctgcctccaagaagggccaagcgatctggatctggagcaacaaacttctcactactcaaacaagcaggtgacgtggaggagaatcccgggcctactagtatggactggatttggcgcatccttttccttgtcggcgctgctaccggcgcgcattccttcgaacaagaagtgacacagatccctgccgctctgtctgtgcctgagggcgaaaacctggtgctgaactgctccttcaccgacagcgccatctacaacctccagtggttcaggcaggaccctggaaagggactgacaagcctgctgctgatccagagcagccagagagagcagacctccggcagactgaatgccagcctggataagagcagcggcaggtctaccctgtatatcgccgcttctcagcctggcgatagcgccacatatctgtgtgctgtgcggcctacaagcggcggcagctacatccctacatttggcagaggcaccagcctgatcgtgcacccttatacgcgtatccagaaccctgatcctgccgtgtaccagctgcgggatagcaagagcagcgacaagagcgtgtgtctgttcaccgacttcgacagccagaccaacgtgtcccagagcaaggactccgacgtgtacatcaccgataagaccgtgctggacatgcggagcatggacttcaagagcaactccgccgtggcctggtccaacaagtccgatttcgcctgcgccaacgccttcaacaacagcattatccccgaggacacattcttcccaagccccgagagcagctgcggtacccagagttttgggttgttggaccctaaattgtgctatctgttggacggaatcctgttcatttacggagtgatcctgaccgcattgttcctgcgggttaagttttccagatccgcagacgcacccgcttaccaacaagggcagaaccaactctacaatgaacttaatttggggcggagggaagagtacgacgttctggacaaaaggaggggacgagatcccgagatgggcggaaagcctcagcgaaggaagaatccgcaagaggggctttataacgaactccagaaagataaaatggcagaagcctatagtgagattgggatgaagggagaaaggaggaggggtaaaggtcacgatgggttgtaccaaggattgagcacagccactaaagatacctatgatgcgctccacatgcaggccctgccgccaagataa

SEQ ID NO: 9397 - DNA, 2454 bp, Artificial Sequence
  Synthetic Polynucleotide
atggccttaccagtgaccgccttgctcctgccgctggccttgctgctccacgccgccaggccggaattcaatgctggcgtgacccagacacctaagttccaggtgctgaaaaccggccagagcatgaccctgcaatgcgcccaggacatgaaccatgagtacatgagctggtacagacaggaccccggcatgggcctgagactgatccactactctgtggctatccagaccaccgaccagggcgaagtgcccaatggctacaacgtgtccagaagcaccatcgaggacttcccactgagactgctgtctgccgctcctagccagaccagcgtgtacttttgtgccagcagctacctgggcaacaccggcgagctgttttttggcgagggcagcagactgaccgtgctcgaggacctgaagaacgtgttcccacctgaggtggccgtgttcgagcctagcgaggccgagatcagccacacccagaaagccaccctcgtgtgcctggctaccggcttctaccccgaccatgtggaactgtcttggtgggtcaacggcaaagaggtgcacagcggcgtgtctaccgacccccagccactgaaagaacagcccgccctgaacgacagccggtactgcctgagcagcagactgagagtgtccgccaccttctggcagaacccccggaaccacttcagatgccaggtgcagttctacggcctgagcgagaacgacgagtggacccaggacagagccaagcccgtgacccagatcgtgtctgccgaagcctggggcagagccgattgcggatcccagagcttcggcctgctggaccccaagctgtgctacctgctggatggcatcctgttcatctacggcgtgatcctgaccgccctgttcctgagagtgaagttcagcagaagcgccgacgcccctgcctaccagcagggacagaaccaactgtacaacgagctgaacctgggcagacgggaagagtacgacgtgctggacaagcggagaggcagggaccctgagatgggcggaaagccccagcggagaaagaacccccaggaaggactgttcaacgaactccagaaagacaagatggccgaagccttcagcgagatcggcatgaagggcgagcggagaagaggcaagggccacgatggcctgttccagggcctgagcaccgccaccaaggacaccttcgacgccctgcacatgcaggccctgcctccaagaagggccaagcgatctggatctggagcaacaaacttctcactactcaaacaagcaggtgacgtggaggagaatcccgggcctactagtatggactggatttggcgcatccttttccttgtcggcgctgctaccggcgcgcattccttcgaacaagaagtgacacagatccctgccgctctgtctgtgcctgagggcgaaaacctggtgctgaactgctccttcaccgacagcgccatctacaacctccagtggttcaggcaggaccctggaaagggactgacaagcctgctgctgatccagagcagccagagagagcagacctccggcagactgaatgccagcctggataagagcagcggcaggtctaccctgtatatcgccgcttctcagcctggcgatagcgccacatatctgtgtgctgtgcggcctacaagcggcggcagctacatccctacatttggcagaggcaccagcctgatcgtgcacccttatacgcgtatccagaaccctgatcctgccgtgtaccagctgcgggatagcaagagcagcgacaagagcgtgtgtctgttcaccgacttcgacagccagaccaacgtgtcccagagcaaggactccgacgtgtacatcaccgataagaccgtgctggacatgcggagcatggacttcaagagcaactccgccgtggcctggtccaacaagtccgatttcgcctgcgccaacgccttcaacaacagcattatccccgaggacacattcttcccaagccccgagagcagctgcggtacccagagcttcggcctgctggaccccaagctgtgctacctgctggatggcatcctgttcatctacggcgtgatcctgaccgccctgttcctgagagtgaagttcagcagaagcgccgacgcccctgcctaccagcagggacagaaccaactgtacaacgagctgaacctgggcagacgggaagagtacgacgtgctggacaagcggagaggcagggaccctgagatgggcggaaagccccagcggagaaagaacccccaggaaggactgtataacgaactccagaaagacaagatggccgaagcctacagcgagatcggcatgaagggcgagcggagaagaggcaagggccacgatggcctgtaccagggcctgagcaccgccaccaaggacacctatgacgccctgcacatgcaggccctgcctccaagataa

SEQ ID NO: 9398 - DNA, 2580 bp, Artificial Sequence
  Synthetic Polynucleotide
atggccttaccagtgaccgccttgctcctgccgctggccttgctgctccacgccgccaggccggaattcaatgctggcgtgacccagacacctaagttccaggtgctgaaaaccggccagagcatgaccctgcaatgcgcccaggacatgaaccatgagtacatgagctggtacagacaggaccccggcatgggcctgagactgatccactactctgtggctatccagaccaccgaccagggcgaagtgcccaatggctacaacgtgtccagaagcaccatcgaggacttcccactgagactgctgtctgccgctcctagccagaccagcgtgtacttttgtgccagcagctacctgggcaacaccggcgagctgttttttggcgagggcagcagactgaccgtgctcgaggacctgaagaacgtgttcccacctgaggtggccgtgttcgagcctagcgaggccgagatcagccacacccagaaagccaccctcgtgtgcctggctaccggcttctaccccgaccatgtggaactgtcttggtgggtcaacggcaaagaggtgcacagcggcgtgtctaccgacccccagccactgaaagaacagcccgccctgaacgacagccggtactgcctgagcagcagactgagagtgtccgccaccttctggcagaacccccggaaccacttcagatgccaggtgcagttctacggcctgagcgagaacgacgagtggacccaggacagagccaagcccgtgacccagatcgtgtctgccgaagcctggggcagagccgattgcggatcccagagcttcggcctgctggaccccaagctgtgctacctgctggatggcatcctgttcatctacggcgtgatcctgaccgccctgttcctgagagtgaagttcagcagaagcgccgacgcccctgcctaccagcagggacagaaccaactgtacaacgagctgaacctgggcagacgggaagagtacgacgtgctggacaagcggagaggcagggaccctgagatgggcggaaagccccagcggagaaagaacccccaggaaggactgttcaacgaactccagaaagacaagatggccgaagccttcagcgagatcggcatgaagggcgagcggagaagaggcaagggccacgatggcctgttccagggcctgagcaccgccaccaaggacaccttcgacgccctgcacatgcaggccctgcctccaagaagggccaagcgatctggatctggagcaacaaacttctcactactcaaacaagcaggtgacgtggaggagaatcccgggcctactagtatggactggatttggcgcatccttttccttgtcggcgctgctaccggcgcgcattccttcgaacaagaagtgacacagatccctgccgctctgtctgtgcctgagggcgaaaacctggtgctgaactgctccttcaccgacagcgccatctacaacctccagtggttcaggcaggaccctggaaagggactgacaagcctgctgctgatccagagcagccagagagagcagacctccggcagactgaatgccagcctggataagagcagcggcaggtctaccctgtatatcgccgcttctcagcctggcgatagcgccacatatctgtgtgctgtgcggcctacaagcggcggcagctacatccctacatttggcagaggcaccagcctgatcgtgcacccttatacgcgtatccagaaccctgatcctgccgtgtaccagctgcgggatagcaagagcagcgacaagagcgtgtgtctgttcaccgacttcgacagccagaccaacgtgtcccagagcaaggactccgacgtgtacatcaccgataagaccgtgctggacatgcggagcatggacttcaagagcaactccgccgtggcctggtccaacaagtccgatttcgcctgcgccaacgccttcaacaacagcattatccccgaggacacattcttcccaagccccgagagcagctgcggtacccagagcttcggcctgctggaccccaagctgtgctacctgctggatggcatcctgttcatctacggcgtgatcctgaccgccctgttcctgaaacggggcagaaagaaactcctgtatatattcaaacaaccatttatgagaccagtacaaactactcaagaggaagatggctgtagctgccgatttccagaagaagaagaaggaggatgtgaactgagagtgaagttcagcagaagcgccgacgcccctgcctaccagcagggacagaaccaactgtacaacgagctgaacctgggcagacgggaagagtacgacgtgctggacaagcggagaggcagggaccctgagatgggcggaaagccccagcggagaaagaacccccaggaaggactgtataacgaactccagaaagacaagatggccgaagcctacagcgagatcggcatgaagggcgagcggagaagaggcaagggccacgatggcctgtaccagggcctgagcaccgccaccaaggacacctatgacgccctgcacatgcaggccctgcctccaagataa

SEQ ID NO: 9399 - DNA, 2577 bp, Artificial Sequence
  Synthetic Polynucleotide
atggccttaccagtgaccgccttgctcctgccgctggccttgctgctccacgccgccaggccggaattcaatgctggcgtgacccagacacctaagttccaggtgctgaaaaccggccagagcatgaccctgcaatgcgcccaggacatgaaccatgagtacatgagctggtacagacaggaccccggcatgggcctgagactgatccactactctgtggctatccagaccaccgaccagggcgaagtgcccaatggctacaacgtgtccagaagcaccatcgaggacttcccactgagactgctgtctgccgctcctagccagaccagcgtgtacttttgtgccagcagctacctgggcaacaccggcgagctgttttttggcgagggcagcagactgaccgtgctcgaggacctgaagaacgtgttcccacctgaggtggccgtgttcgagcctagcgaggccgagatcagccacacccagaaagccaccctcgtgtgcctggctaccggcttctaccccgaccatgtggaactgtcttggtgggtcaacggcaaagaggtgcacagcggcgtgtctaccgacccccagccactgaaagaacagcccgccctgaacgacagccggtactgcctgagcagcagactgagagtgtccgccaccttctggcagaacccccggaaccacttcagatgccaggtgcagttctacggcctgagcgagaacgacgagtggacccaggacagagccaagcccgtgacccagatcgtgtctgccgaagcctggggcagagccgattgcggatcccagagcttcggcctgctggaccccaagctgtgctacctgctggatggcatcctgttcatctacggcgtgatcctgaccgccctgttcctgagagtgaagttcagcagaagcgccgacgcccctgcctaccagcagggacagaaccaactgtacaacgagctgaacctgggcagacgggaagagtacgacgtgctggacaagcggagaggcagggaccctgagatgggcggaaagccccagcggagaaagaacccccaggaaggactgttcaacgaactccagaaagacaagatggccgaagccttcagcgagatcggcatgaagggcgagcggagaagaggcaagggccacgatggcctgttccagggcctgagcaccgccaccaaggacaccttcgacgccctgcacatgcaggccctgcctccaagaagggccaagcgatctggatctggagcaacaaacttctcactactcaaacaagcaggtgacgtggaggagaatcccgggcctactagtatggactggatttggcgcatccttttccttgtcggcgctgctaccggcgcgcattccttcgaacaagaagtgacacagatccctgccgctctgtctgtgcctgagggcgaaaacctggtgctgaactgctccttcaccgacagcgccatctacaacctccagtggttcaggcaggaccctggaaagggactgacaagcctgctgctgatccagagcagccagagagagcagacctccggcagactgaatgccagcctggataagagcagcggcaggtctaccctgtatatcgccgcttctcagcctggcgatagcgccacatatctgtgtgctgtgcggcctacaagcggcggcagctacatccctacatttggcagaggcaccagcctgatcgtgcacccttatacgcgtatccagaaccctgatcctgccgtgtaccagctgcgggatagcaagagcagcgacaagagcgtgtgtctgttcaccgacttcgacagccagaccaacgtgtcccagagcaaggactccgacgtgtacatcaccgataagaccgtgctggacatgcggagcatggacttcaagagcaactccgccgtggcctggtccaacaagtccgatttcgcctgcgccaacgccttcaacaacagcattatccccgaggacacattcttcccaagccccgagagcagctgcggtacccagagcttcggcctgctggaccccaagctgtgctacctgctggatggcatcctgttcatctacggcgtgatcctgaccgccctgttcctgaggagtaagaggagcaggctcctgcacagtgactacatgaacatgactccacgccgccccggacccacccgcaagcattaccagccctatgccccaccacgcgacttcgcagcctatcgctccagagtgaagttcagcagaagcgccgacgcccctgcctaccagcagggacagaaccaactgtacaacgagctgaacctgggcagacgggaagagtacgacgtgctggacaagcggagaggcagggaccctgagatgggcggaaagccccagcggagaaagaacccccaggaaggactgtataacgaactccagaaagacaagatggccgaagcctacagcgagatcggcatgaagggcgagcggagaagaggcaagggccacgatggcctgtaccagggcctgagcaccgccaccaaggacacctatgacgccctgcacatgcaggccctgcctccaagataa

SEQ ID NO: 9400 - DNA, 2562 bp, Artificial Sequence
  Synthetic Polynucleotide
atggccttaccagtgaccgccttgctcctgccgctggccttgctgctccacgccgccaggccggaattcaatgctggcgtgacccagacacctaagttccaggtgctgaaaaccggccagagcatgaccctgcaatgcgcccaggacatgaaccatgagtacatgagctggtacagacaggaccccggcatgggcctgagactgatccactactctgtggctatccagaccaccgaccagggcgaagtgcccaatggctacaacgtgtccagaagcaccatcgaggacttcccactgagactgctgtctgccgctcctagccagaccagcgtgtacttttgtgccagcagctacctgggcaacaccggcgagctgttttttggcgagggcagcagactgaccgtgctcgaggacctgaagaacgtgttcccacctgaggtggccgtgttcgagcctagcgaggccgagatcagccacacccagaaagccaccctcgtgtgcctggctaccggcttctaccccgaccatgtggaactgtcttggtgggtcaacggcaaagaggtgcacagcggcgtgtctaccgacccccagccactgaaagaacagcccgccctgaacgacagccggtactgcctgagcagcagactgagagtgtccgccaccttctggcagaacccccggaaccacttcagatgccaggtgcagttctacggcctgagcgagaacgacgagtggacccaggacagagccaagcccgtgacccagatcgtgtctgccgaagcctggggcagagccgattgcggatcccagagcttcggcctgctggaccccaagctgtgctacctgctggatggcatcctgttcatctacggcgtgatcctgaccgccctgttcctgagagtgaagttcagcagaagcgccgacgcccctgcctaccagcagggacagaaccaactgtacaacgagctgaacctgggcagacgggaagagtacgacgtgctggacaagcggagaggcagggaccctgagatgggcggaaagccccagcggagaaagaacccccaggaaggactgttcaacgaactccagaaagacaagatggccgaagccttcagcgagatcggcatgaagggcgagcggagaagaggcaagggccacgatggcctgttccagggcctgagcaccgccaccaaggacaccttcgacgccctgcacatgcaggccctgcctccaagaagggccaagcgatctggatctggagcaacaaacttctcactactcaaacaagcaggtgacgtggaggagaatcccgggcctactagtatggactggatttggcgcatccttttccttgtcggcgctgctaccggcgcgcattccttcgaacaagaagtgacacagatccctgccgctctgtctgtgcctgagggcgaaaacctggtgctgaactgctccttcaccgacagcgccatctacaacctccagtggttcaggcaggaccctggaaagggactgacaagcctgctgctgatccagagcagccagagagagcagacctccggcagactgaatgccagcctggataagagcagcggcaggtctaccctgtatatcgccgcttctcagcctggcgatagcgccacatatctgtgtgctgtgcggcctacaagcggcggcagctacatccctacatttggcagaggcaccagcctgatcgtgcacccttatacgcgtatccagaaccctgatcctgccgtgtaccagctgcgggatagcaagagcagcgacaagagcgtgtgtctgttcaccgacttcgacagccagaccaacgtgtcccagagcaaggactccgacgtgtacatcaccgataagaccgtgctggacatgcggagcatggacttcaagagcaactccgccgtggcctggtccaacaagtccgatttcgcctgcgccaacgccttcaacaacagcattatccccgaggacacattcttcccaagccccgagagcagctgcggtacccagagcttcggcctgctggaccccaagctgtgctacctgctggatggcatcctgttcatctacggcgtgatcctgaccgccctgttcctgagggaccaaagactgcctcctgacgctcacaaacctccaggcggaggcagcttcagaacccctatccaagaggaacaggctgacgcccacagcaccctggcaaaaattagagtgaagttcagcagaagcgccgacgcccctgcctaccagcagggacagaaccaactgtacaacgagctgaacctgggcagacgggaagagtacgacgtgctggacaagcggagaggcagggaccctgagatgggcggaaagccccagcggagaaagaacccccaggaaggactgtataacgaactccagaaagacaagatggccgaagcctacagcgagatcggcatgaagggcgagcggagaagaggcaagggccacgatggcctgtaccagggcctgagcaccgccaccaaggacacctatgacgccctgcacatgcaggccctgcctccaagataa

SEQ ID NO: 9401 - DNA, 2814 bp, Artificial Sequence
  Synthetic Polynucleotide
atggccttaccagtgaccgccttgctcctgccgctggccttgctgctccacgccgccaggccggaattcaatgctggcgtgacccagacacctaagttccaggtgctgaaaaccggccagagcatgaccctgcaatgcgcccaggacatgaaccatgagtacatgagctggtacagacaggaccccggcatgggcctgagactgatccactactctgtggctatccagaccaccgaccagggcgaagtgcccaatggctacaacgtgtccagaagcaccatcgaggacttcccactgagactgctgtctgccgctcctagccagaccagcgtgtacttttgtgccagcagctacctgggcaacaccggcgagctgttttttggcgagggcagcagactgaccgtgctcgaggacctgaagaacgtgttcccacctgaggtggccgtgttcgagcctagcgaggccgagatcagccacacccagaaagccaccctcgtgtgcctggctaccggcttctaccccgaccatgtggaactgtcttggtgggtcaacggcaaagaggtgcacagcggcgtgtctaccgacccccagccactgaaagaacagcccgccctgaacgacagccggtactgcctgagcagcagactgagagtgtccgccaccttctggcagaacccccggaaccacttcagatgccaggtgcagttctacggcctgagcgagaacgacgagtggacccaggacagagccaagcccgtgacccagatcgtgtctgccgaagcctggggcagagccgattgcggatcccagagcttcggcctgctggaccccaagctgtgctacctgctggatggcatcctgttcatctacggcgtgatcctgaccgccctgttcctgagagtgaagttcagcagaagcgccgacgcccctgcctaccagcagggacagaaccaactgtacaacgagctgaacctgggcagacgggaagagtacgacgtgctggacaagcggagaggcagggaccctgagatgggcggaaagccccagcggagaaagaacccccaggaaggactgttcaacgaactccagaaagacaagatggccgaagccttcagcgagatcggcatgaagggcgagcggagaagaggcaagggccacgatggcctgttccagggcctgagcaccgccaccaaggacaccttcgacgccctgcacatgcaggccctgcctccaagaagggccaagcgatctggatctggagcaacaaacttctcactactcaaacaagcaggtgacgtggaggagaatcccgggcctactagtatggactggatttggcgcatccttttccttgtcggcgctgctaccggcgcgcattccttcgaacaagaagtgacacagatccctgccgctctgtctgtgcctgagggcgaaaacctggtgctgaactgctccttcaccgacagcgccatctacaacctccagtggttcaggcaggaccctggaaagggactgacaagcctgctgctgatccagagcagccagagagagcagacctccggcagactgaatgccagcctggataagagcagcggcaggtctaccctgtatatcgccgcttctcagcctggcgatagcgccacatatctgtgtgctgtgcggcctacaagcggcggcagctacatccctacatttggcagaggcaccagcctgatcgtgcacccttatacgcgtatccagaaccctgatcctgccgtgtaccagctgcgggatagcaagagcagcgacaagagcgtgtgtctgttcaccgacttcgacagccagaccaacgtgtcccagagcaaggactccgacgtgtacatcaccgataagaccgtgctggacatgcggagcatggacttcaagagcaactccgccgtggcctggtccaacaagtccgatttcgcctgcgccaacgccttcaacaacagcattatccccgaggacacattcttcccaagccccgagagcagctgcggtacccagagcttcggcctgctggaccccaagctgtgctacctgctggatggcatcctgttcatctacggcgtgatcctgaccgccctgttcctgtggcggcggaagcggaaagagaagcagtctgagacaagccccaaagagttcctgaccatctacgaggacgtgaaggacctgaaaacccggcggaaccacgaacaagagcagacctttcctggcggaggcagcaccatctacagcatgatccagagccagagcagcgcccctacaagccaagagcctgcctacacactgtactccctgatccagcctagcagaaagagcggcagccggaagagaaatcacagccccagcttcaacagcacgatctacgaagtgatcggcaagagccagccaaaggctcagaaccctgccagactgagccggaaagagctggaaaacttcgacgtgtacagcagagtgaagttcagcagaagcgccgacgcccctgcctaccagcagggacagaaccaactgtacaacgagctgaacctgggcagacgggaagagtacgacgtgctggacaagcggagaggcagggaccctgagatgggcggaaagccccagcggagaaagaacccccaggaaggactgtataacgaactccagaaagacaagatggccgaagcctacagcgagatcggcatgaagggcgagcggagaagaggcaagggccacgatggcctgtaccagggcctgagcaccgccaccaaggacacctatgacgccctgcacatgcaggccctgcctccaagataa

SEQ ID NO: 9402 - DNA, 2577 bp, Artificial Sequence
  Synthetic Polynucleotide
atggccttaccagtgaccgccttgctcctgccgctggccttgctgctccacgccgccaggccggaattcaatgctggcgtgacccagacacctaagttccaggtgctgaaaaccggccagagcatgaccctgcaatgcgcccaggacatgaaccatgagtacatgagctggtacagacaggaccccggcatgggcctgagactgatccactactctgtggctatccagaccaccgaccagggcgaagtgcccaatggctacaacgtgtccagaagcaccatcgaggacttcccactgagactgctgtctgccgctcctagccagaccagcgtgtacttttgtgccagcagctacctgggcaacaccggcgagctgttttttggcgagggcagcagactgaccgtgctcgaggacctgaagaacgtgttcccacctgaggtggccgtgttcgagcctagcgaggccgagatcagccacacccagaaagccaccctcgtgtgcctggctaccggcttctaccccgaccatgtggaactgtcttggtgggtcaacggcaaagaggtgcacagcggcgtgtctaccgacccccagccactgaaagaacagcccgccctgaacgacagccggtactgcctgagcagcagactgagagtgtccgccaccttctggcagaacccccggaaccacttcagatgccaggtgcagttctacggcctgagcgagaacgacgagtggacccaggacagagccaagcccgtgacccagatcgtgtctgccgaagcctggggcagagccgattgcggatcccagagcttcggcctgctggaccccaagctgtgctacctgctggatggcatcctgttcatctacggcgtgatcctgaccgccctgttcctgagagtgaagttcagcagaagcgccgacgcccctgcctaccagcagggacagaaccaactgtacaacgagctgaacctgggcagacgggaagagtacgacgtgctggacaagcggagaggcagggaccctgagatgggcggaaagccccagcggagaaagaacccccaggaaggactgttcaacgaactccagaaagacaagatggccgaagccttcagcgagatcggcatgaagggcgagcggagaagaggcaagggccacgatggcctgttccagggcctgagcaccgccaccaaggacaccttcgacgccctgcacatgcaggccctgcctccaagaagggccaagcgatctggatctggagcaacaaacttctcactactcaaacaagcaggtgacgtggaggagaatcccgggcctactagtatggactggatttggcgcatccttttccttgtcggcgctgctaccggcgcgcattccttcgaacaagaagtgacacagatccctgccgctctgtctgtgcctgagggcgaaaacctggtgctgaactgctccttcaccgacagcgccatctacaacctccagtggttcaggcaggaccctggaaagggactgacaagcctgctgctgatccagagcagccagagagagcagacctccggcagactgaatgccagcctggataagagcagcggcaggtctaccctgtatatcgccgcttctcagcctggcgatagcgccacatatctgtgtgctgtgcggcctacaagcggcggcagctacatccctacatttggcagaggcaccagcctgatcgtgcacccttatacgcgtatccagaaccctgatcctgccgtgtaccagctgcgggatagcaagagcagcgacaagagcgtgtgtctgttcaccgacttcgacagccagaccaacgtgtcccagagcaaggactccgacgtgtacatcaccgataagaccgtgctggacatgcggagcatggacttcaagagcaactccgccgtggcctggtccaacaagtccgatttcgcctgcgccaacgccttcaacaacagcattatccccgaggacacattcttcccaagccccgagagcagctgcggtacccagagttttgggttgttggaccctaaattgtgctatctgttggacggaatcctgttcatttacggagtgatcctgaccgcattgttcctgaggagcaagcggtcacggctgctccacagcgattacatgaatatgacaccacgaagaccgggtcctactcgcaaacactaccaaccctacgcacctccccgcgactttgcagcgtaccgatctcgggttaagttttccagatccgcagacgcacccgcttaccaacaagggcagaaccaactctacaatgaacttaatttggggcggagggaagagtacgacgttctggacaaaaggaggggacgagatcccgagatgggcggaaagcctcagcgaaggaagaatccgcaagaggggctttataacgaactccagaaagataaaatggcagaagcctatagtgagattgggatgaagggagaaaggaggaggggtaaaggtcacgatgggttgtaccaaggattgagcacagccactaaagatacctatgatgcgctccacatgcaggccctgccgccaagataa

SEQ ID NO: 9403 - DNA, 2580 bp, Artificial Sequence
  Synthetic Polynucleotide
atggccttaccagtgaccgccttgctcctgccgctggccttgctgctccacgccgccaggccggaattcaatgctggcgtgacccagacacctaagttccaggtgctgaaaaccggccagagcatgaccctgcaatgcgcccaggacatgaaccatgagtacatgagctggtacagacaggaccccggcatgggcctgagactgatccactactctgtggctatccagaccaccgaccagggcgaagtgcccaatggctacaacgtgtccagaagcaccatcgaggacttcccactgagactgctgtctgccgctcctagccagaccagcgtgtacttttgtgccagcagctacctgggcaacaccggcgagctgttttttggcgagggcagcagactgaccgtgctcgaggacctgaagaacgtgttcccacctgaggtggccgtgttcgagcctagcgaggccgagatcagccacacccagaaagccaccctcgtgtgcctggctaccggcttctaccccgaccatgtggaactgtcttggtgggtcaacggcaaagaggtgcacagcggcgtgtctaccgacccccagccactgaaagaacagcccgccctgaacgacagccggtactgcctgagcagcagactgagagtgtccgccaccttctggcagaacccccggaaccacttcagatgccaggtgcagttctacggcctgagcgagaacgacgagtggacccaggacagagccaagcccgtgacccagatcgtgtctgccgaagcctggggcagagccgattgcggatcccagagcttcggcctgctggaccccaagctgtgctacctgctggatggcatcctgttcatctacggcgtgatcctgaccgccctgttcctgagagtgaagttcagcagaagcgccgacgcccctgcctaccagcagggacagaaccaactgtacaacgagctgaacctgggcagacgggaagagtacgacgtgctggacaagcggagaggcagggaccctgagatgggcggaaagccccagcggagaaagaacccccaggaaggactgttcaacgaactccagaaagacaagatggccgaagccttcagcgagatcggcatgaagggcgagcggagaagaggcaagggccacgatggcctgttccagggcctgagcaccgccaccaaggacaccttcgacgccctgcacatgcaggccctgcctccaagaagggccaagcgatctggatctggagcaacaaacttctcactactcaaacaagcaggtgacgtggaggagaatcccgggcctactagtatggactggatttggcgcatccttttccttgtcggcgctgctaccggcgcgcattccttcgaacaagaagtgacacagatccctgccgctctgtctgtgcctgagggcgaaaacctggtgctgaactgctccttcaccgacagcgccatctacaacctccagtggttcaggcaggaccctggaaagggactgacaagcctgctgctgatccagagcagccagagagagcagacctccggcagactgaatgccagcctggataagagcagcggcaggtctaccctgtatatcgccgcttctcagcctggcgatagcgccacatatctgtgtgctgtgcggcctacaagcggcggcagctacatccctacatttggcagaggcaccagcctgatcgtgcacccttatacgcgtatccagaaccctgatcctgccgtgtaccagctgcgggatagcaagagcagcgacaagagcgtgtgtctgttcaccgacttcgacagccagaccaacgtgtcccagagcaaggactccgacgtgtacatcaccgataagaccgtgctggacatgcggagcatggacttcaagagcaactccgccgtggcctggtccaacaagtccgatttcgcctgcgccaacgccttcaacaacagcattatccccgaggacacattcttcccaagccccgagagcagctgcggtacccagagttttgggttgttggaccctaaattgtgctatctgttggacggaatcctgttcatttacggagtgatcctgaccgcattgttcctgaagagaggccggaagaagctgctgtacatcttcaagcagcctttcatgcggcccgtgcagaccacccaggaagaggacggctgctcctgccggttccccgaggaagaagaaggcggctgcgagctgcgggttaagttttccagatccgcagacgcacccgcttaccaacaagggcagaaccaactctacaatgaacttaatttggggcggagggaagagtacgacgttctggacaaaaggaggggacgagatcccgagatgggcggaaagcctcagcgaaggaagaatccgcaagaggggctttataacgaactccagaaagataaaatggcagaagcctatagtgagattgggatgaagggagaaaggaggaggggtaaaggtcacgatgggttgtaccaaggattgagcacagccactaaagatacctatgatgcgctccacatgcaggccctgccgccaagataa

SEQ ID NO: 9404 - DNA, 2454 bp, Artificial Sequence
  Synthetic Polynucleotide
atggccttaccagtgaccgccttgctcctgccgctggccttgctgctccacgccgccaggccggaattcaatgctggcgtgacccagacacctaagttccaggtgctgaaaaccggccagagcatgaccctgcaatgcgcccaggacatgaaccatgagtacatgagctggtacagacaggaccccggcatgggcctgagactgatccactactctgtggctatccagaccaccgaccagggcgaagtgcccaatggctacaacgtgtccagaagcaccatcgaggacttcccactgagactgctgtctgccgctcctagccagaccagcgtgtacttttgtgccagcagctacctgggcaacaccggcgagctgttttttggcgagggcagcagactgaccgtgctcgaggacctgaagaacgtgttcccacctgaggtggccgtgttcgagcctagcgaggccgagatcagccacacccagaaagccaccctcgtgtgcctggctaccggcttctaccccgaccatgtggaactgtcttggtgggtcaacggcaaagaggtgcacagcggcgtgtctaccgacccccagccactgaaagaacagcccgccctgaacgacagccggtactgcctgagcagcagactgagagtgtccgccaccttctggcagaacccccggaaccacttcagatgccaggtgcagttctacggcctgagcgagaacgacgagtggacccaggacagagccaagcccgtgacccagatcgtgtctgccgaagcctggggcagagccgattgcggatcccagagcttcggcctgctggaccccaagctgtgctacctgctggatggcatcctgttcatctacggcgtgatcctgaccgccctgttcctgagagtgaagttcagcagaagcgccgacgcccctgcctaccagcagggacagaaccaactgtacaacgagctgaacctgggcagacgggaagagtacgacgtgctggacaagcggagaggcagggaccctgagatgggcggaaagccccagcggagaaagaacccccaggaaggactgttcaacgaactccagaaagacaagatggccgaagccttcagcgagatcggcatgaagggcgagcggagaagaggcaagggccacgatggcctgttccagggcctgagcaccgccaccaaggacaccttcgacgccctgcacatgcaggccctgcctccaagaagggccaagcgatctggatctggagcaacaaacttctcactactcaaacaagcaggtgacgtggaggagaatcccgggcctactagtatggactggatttggcgcatccttttccttgtcggcgctgctaccggcgcgcattccttcgaacaagaagtgacacagatccctgccgctctgtctgtgcctgagggcgaaaacctggtgctgaactgctccttcaccgacagcgccatctacaacctccagtggttcaggcaggaccctggaaagggactgacaagcctgctgctgatccagagcagccagagagagcagacctccggcagactgaatgccagcctggataagagcagcggcaggtctaccctgtatatcgccgcttctcagcctggcgatagcgccacatatctgtgtgctgtgcggcctacaagcggcggcagctacatccctacatttggcagaggcaccagcctgatcgtgcacccttatacgcgtatccagaaccctgatcctgccgtgtaccagctgcgggatagcaagagcagcgacaagagcgtgtgtctgttcaccgacttcgacagccagaccaacgtgtcccagagcaaggactccgacgtgtacatcaccgataagaccgtgctggacatgcggagcatggacttcaagagcaactccgccgtggcctggtccaacaagtccgatttcgcctgcgccaacgccttcaacaacagcattatccccgaggacacattcttcccaagccccgagagcagctgcggtacccagagcttcggcctgctggaccccaagctgagctacctgctggatggcatcctgttcatctacggcgtgatcctgaccgccctgttcctgagagtgaagttcagcagaagcgccgacgcccctgcctaccagcagggacagaaccaactgtacaacgagctgaacctgggcagacgggaagagtacgacgtgctggacaagcggagaggcagggaccctgagatgggcggaaagccccagcggagaaagaacccccaggaaggactgtataacgaactccagaaagacaagatggccgaagcctacagcgagatcggcatgaagggcgagcggagaagaggcaagggccacgatggcctgtaccagggcctgagcaccgccaccaaggacacctatgacgccctgcacatgcaggccctgcctccaagataa

SEQ ID NO: 9405 - DNA, 2454 bp, Artificial Sequence
  Synthetic Polynucleotide
atggccttaccagtgaccgccttgctcctgccgctggccttgctgctccacgccgccaggccggaattcaatgctggcgtgacccagacacctaagttccaggtgctgaaaaccggccagagcatgaccctgcaatgcgcccaggacatgaaccatgagtacatgagctggtacagacaggaccccggcatgggcctgagactgatccactactctgtggctatccagaccaccgaccagggcgaagtgcccaatggctacaacgtgtccagaagcaccatcgaggacttcccactgagactgctgtctgccgctcctagccagaccagcgtgtacttttgtgccagcagctacctgggcaacaccggcgagctgttttttggcgagggcagcagactgaccgtgctcgaggacctgaagaacgtgttcccacctgaggtggccgtgttcgagcctagcgaggccgagatcagccacacccagaaagccaccctcgtgtgcctggctaccggcttctaccccgaccatgtggaactgtcttggtgggtcaacggcaaagaggtgcacagcggcgtgtctaccgacccccagccactgaaagaacagcccgccctgaacgacagccggtactgcctgagcagcagactgagagtgtccgccaccttctggcagaacccccggaaccacttcagatgccaggtgcagttctacggcctgagcgagaacgacgagtggacccaggacagagccaagcccgtgacccagatcgtgtctgccgaagcctggggcagagccgattgcggatcccagagcttcggcctgctggaccccaagctgtgctacctgctggatggcatcctgttcatctacggcgtgatcctgaccgccctgttcctgagagtgaagttcagcagaagcgccgacgcccctgcctaccagcagggacagaaccaactgtacaacgagctgaacctgggcagacgggaagagtacgacgtgctggacaagcggagaggcagggaccctgagatgggcggaaagccccagcggagaaagaacccccaggaaggactgttcaacgaactccagaaagacaagatggccgaagccttcagcgagatcggcatgaagggcgagcggagaagaggcaagggccacgatggcctgttccagggcctgagcaccgccaccaaggacaccttcgacgccctgcacatgcaggccctgcctccaagaagggccaagcgatctggatctggagcaacaaacttctcactactcaaacaagcaggtgacgtggaggagaatcccgggcctactagtatggactggatttggcgcatccttttccttgtcggcgctgctaccggcgcgcattccttcgaacaagaagtgacacagatccctgccgctctgtctgtgcctgagggcgaaaacctggtgctgaactgctccttcaccgacagcgccatctacaacctccagtggttcaggcaggaccctggaaagggactgacaagcctgctgctgatccagagcagccagagagagcagacctccggcagactgaatgccagcctggataagagcagcggcaggtctaccctgtatatcgccgcttctcagcctggcgatagcgccacatatctgtgtgctgtgcggcctacaagcggcggcagctacatccctacatttggcagaggcaccagcctgatcgtgcacccttatacgcgtatccagaaccctgatcctgccgtgtaccagctgcgggatagcaagagcagcgacaagagcgtgtgtctgttcaccgacttcgacagccagaccaacgtgtcccagagcaaggactccgacgtgtacatcaccgataagaccgtgctggacatgcggagcatggacttcaagagcaactccgccgtggcctggtccaacaagtccgatttcgcctgcgccaacgccttcaacaacagcattatccccgaggacacattcttcccaagccccgagagcagctgcggtacccagagttttgggttgttggaccctaaattgagctatctgttggacggaatcctgttcatttacggagtgatcctgaccgcattgttcctgcgggttaagttttccagatccgcagacgcacccgcttaccaacaagggcagaaccaactctacaatgaacttaatttggggcggagggaagagtacgacgttctggacaaaaggaggggacgagatcccgagatgggcggaaagcctcagcgaaggaagaatccgcaagaggggctttataacgaactccagaaagataaaatggcagaagcctatagtgagattgggatgaagggagaaaggaggaggggtaaaggtcacgatgggttgtaccaaggattgagcacagccactaaagatacctatgatgcgctccacatgcaggccctgccgccaagataa

SEQ ID NO: 9406 - DNA, 2454 bp, Artificial Sequence
  Synthetic Polynucleotide
atggccttaccagtgaccgccttgctcctgccgctggccttgctgctccacgccgccaggccggaattcaatgctggcgtgacccagacacctaagttccaggtgctgaaaaccggccagagcatgaccctgcaatgcgcccaggacatgaaccatgagtacatgagctggtacagacaggaccccggcatgggcctgagactgatccactactctgtggctatccagaccaccgaccagggcgaagtgcccaatggctacaacgtgtccagaagcaccatcgaggacttcccactgagactgctgtctgccgctcctagccagaccagcgtgtacttttgtgccagcagctacctgggcaacaccggcgagctgttttttggcgagggcagcagactgaccgtgctcgaggacctgaagaacgtgttcccacctgaggtggccgtgttcgagcctagcgaggccgagatcagccacacccagaaagccaccctcgtgtgcctggctaccggcttctaccccgaccatgtggaactgtcttggtgggtcaacggcaaagaggtgcacagcggcgtgtctaccgacccccagccactgaaagaacagcccgccctgaacgacagccggtactgcctgagcagcagactgagagtgtccgccaccttctggcagaacccccggaaccacttcagatgccaggtgcagttctacggcctgagcgagaacgacgagtggacccaggacagagccaagcccgtgacccagatcgtgtctgccgaagcctggggcagagccgattgcggatcccagagcttcggcctgctggaccccaagctgagctacctgctggatggcatcctgttcatctacggcgtgatcctgaccgccctgttcctgagagtgaagttcagcagaagcgccgacgcccctgcctaccagcagggacagaaccaactgtacaacgagctgaacctgggcagacgggaagagtacgacgtgctggacaagcggagaggcagggaccctgagatgggcggaaagccccagcggagaaagaacccccaggaaggactgtataacgaactccagaaagacaagatggccgaagcctacagcgagatcggcatgaagggcgagcggagaagaggcaagggccacgatggcctgtaccagggcctgagcaccgccaccaaggacacctatgacgccctgcacatgcaggccctgcctccaagaagggccaagcgatctggatctggagcaacaaacttctcactactcaaacaagcaggtgacgtggaggagaatcccgggcctactagtatggactggatttggcgcatccttttccttgtcggcgctgctaccggcgcgcattccttcgaacaagaagtgacacagatccctgccgctctgtctgtgcctgagggcgaaaacctggtgctgaactgctccttcaccgacagcgccatctacaacctccagtggttcaggcaggaccctggaaagggactgacaagcctgctgctgatccagagcagccagagagagcagacctccggcagactgaatgccagcctggataagagcagcggcaggtctaccctgtatatcgccgcttctcagcctggcgatagcgccacatatctgtgtgctgtgcggcctacaagcggcggcagctacatccctacatttggcagaggcaccagcctgatcgtgcacccttatacgcgtatccagaaccctgatcctgccgtgtaccagctgcgggatagcaagagcagcgacaagagcgtgtgtctgttcaccgacttcgacagccagaccaacgtgtcccagagcaaggactccgacgtgtacatcaccgataagaccgtgctggacatgcggagcatggacttcaagagcaactccgccgtggcctggtccaacaagtccgatttcgcctgcgccaacgccttcaacaacagcattatccccgaggacacattcttcccaagccccgagagcagctgcggtacccagagttttgggttgttggaccctaaattgagctatctgttggacggaatcctgttcatttacggagtgatcctgaccgcattgttcctgcgggttaagttttccagatccgcagacgcacccgcttaccaacaagggcagaaccaactctacaatgaacttaatttggggcggagggaagagtacgacgttctggacaaaaggaggggacgagatcccgagatgggcggaaagcctcagcgaaggaagaatccgcaagaggggctttataacgaactccagaaagataaaatggcagaagcctatagtgagattgggatgaagggagaaaggaggaggggtaaaggtcacgatgggttgtaccaaggattgagcacagccactaaagatacctatgatgcgctccacatgcaggccctgccgccaagataa

SEQ ID NO: 9407 - DNA, 2166 bp, Artificial Sequence
  Synthetic Polynucleotide
atggccttaccagtgaccgccttgctcctgccgctggccttgctgctccacgccgccaggccggaattcaatgctggcgtgacccagacacctaagttccaggtgctgaaaaccggccagagcatgaccctgcaatgcgcccaggacatgaaccatgagtacatgagctggtacagacaggaccccggcatgggcctgagactgatccactactctgtggctatccagaccaccgaccagggcgaagtgcccaatggctacaacgtgtccagaagcaccatcgaggacttcccactgagactgctgtctgccgctcctagccagaccagcgtgtacttttgtgccagcagctacctgggcaacaccggcgagctgttttttggcgagggcagcagactgaccgtgctcgaggacctgaagaacgtgttcccacctgaggtggccgtgttcgagcctagcgaggccgagatcagccacacccagaaagccaccctcgtgtgcctggctaccggcttctaccccgaccatgtggaactgtcttggtgggtcaacggcaaagaggtgcacagcggcgtgtctaccgacccccagccactgaaagaacagcccgccctgaacgacagccggtactgcctgagcagcagactgagagtgtccgccaccttctggcagaacccccggaaccacttcagatgccaggtgcagttctacggcctgagcgagaacgacgagtggacccaggacagagccaagcccgtgacccagatcgtgtctgccgaagcctggggcagagccgattgcggatccacaacacctggcgagagaagtagcctgcctgccttctatcctggcaccagcggctcttgttctggctgtggatctctgagcctgcctctgctggctggactggttgctgctgatgctgtggcctctctgctgattgtgggagccgtgttcctgtgcgccagacctagaagaagccccgctcaagaggacggcaaggtgtacatcaacatgcccggcagaggaagggccaagcgatctggatctggagcaacaaacttctcactactcaaacaagcaggtgacgtggaggagaatcccgggcctactagtatggactggatttggcgcatccttttccttgtcggcgctgctaccggcgcgcattccttcgaacaagaagtgacacagatccctgccgctctgtctgtgcctgagggcgaaaacctggtgctgaactgctccttcaccgacagcgccatctacaacctccagtggttcaggcaggaccctggaaagggactgacaagcctgctgctgatccagagcagccagagagagcagacctccggcagactgaatgccagcctggataagagcagcggcaggtctaccctgtatatcgccgcttctcagcctggcgatagcgccacatatctgtgtgctgtgcggcctacaagcggcggcagctacatccctacatttggcagaggcaccagcctgatcgtgcacccttatacgcgtatccagaaccctgatcctgccgtgtaccagctgcgggatagcaagagcagcgacaagagcgtgtgtctgttcaccgacttcgacagccagaccaacgtgtcccagagcaaggactccgacgtgtacatcaccgataagaccgtgctggacatgcggagcatggacttcaagagcaactccgccgtggcctggtccaacaagtccgatttcgcctgcgccaacgccttcaacaacagcattatccccgaggacacattcttcccaagccccgagagcagctgcggtaccacaacacctggcgagagaagtagcctgcctgccttctatcctggcaccagcggctcttgttctggctgtggatctctgagcctgcctctgctggctggactggttgctgctgatgctgtggcctctctgctgattgtgggagccgtgttcaaacggggcagaaagaaactcctgtatatattcaaacaaccatttatgagaccagtacaaactactcaagaggaagatggctgtagctgccgatttccagaagaagaagaaggaggatgtgaactgctgtgcgccagacctagaagaagccccgctcaagaggacggcaaggtgtacatcaacatgcccggcagaggataa

SEQ ID NO: 9408 - DNA, 2163 bp, Artificial Sequence
  Synthetic Polynucleotide
atggccttaccagtgaccgccttgctcctgccgctggccttgctgctccacgccgccaggccggaattcaatgctggcgtgacccagacacctaagttccaggtgctgaaaaccggccagagcatgaccctgcaatgcgcccaggacatgaaccatgagtacatgagctggtacagacaggaccccggcatgggcctgagactgatccactactctgtggctatccagaccaccgaccagggcgaagtgcccaatggctacaacgtgtccagaagcaccatcgaggacttcccactgagactgctgtctgccgctcctagccagaccagcgtgtacttttgtgccagcagctacctgggcaacaccggcgagctgttttttggcgagggcagcagactgaccgtgctcgaggacctgaagaacgtgttcccacctgaggtggccgtgttcgagcctagcgaggccgagatcagccacacccagaaagccaccctcgtgtgcctggctaccggcttctaccccgaccatgtggaactgtcttggtgggtcaacggcaaagaggtgcacagcggcgtgtctaccgacccccagccactgaaagaacagcccgccctgaacgacagccggtactgcctgagcagcagactgagagtgtccgccaccttctggcagaacccccggaaccacttcagatgccaggtgcagttctacggcctgagcgagaacgacgagtggacccaggacagagccaagcccgtgacccagatcgtgtctgccgaagcctggggcagagccgattgcggatccacaacacctggcgagagaagtagcctgcctgccttctatcctggcaccagcggctcttgttctggctgtggatctctgagcctgcctctgctggctggactggttgctgctgatgctgtggcctctctgctgattgtgggagccgtgttcctgtgcgccagacctagaagaagccccgctcaagaggacggcaaggtgtacatcaacatgcccggcagaggaagggccaagcgatctggatctggagcaacaaacttctcactactcaaacaagcaggtgacgtggaggagaatcccgggcctactagtatggactggatttggcgcatccttttccttgtcggcgctgctaccggcgcgcattccttcgaacaagaagtgacacagatccctgccgctctgtctgtgcctgagggcgaaaacctggtgctgaactgctccttcaccgacagcgccatctacaacctccagtggttcaggcaggaccctggaaagggactgacaagcctgctgctgatccagagcagccagagagagcagacctccggcagactgaatgccagcctggataagagcagcggcaggtctaccctgtatatcgccgcttctcagcctggcgatagcgccacatatctgtgtgctgtgcggcctacaagcggcggcagctacatccctacatttggcagaggcaccagcctgatcgtgcacccttatacgcgtatccagaaccctgatcctgccgtgtaccagctgcgggatagcaagagcagcgacaagagcgtgtgtctgttcaccgacttcgacagccagaccaacgtgtcccagagcaaggactccgacgtgtacatcaccgataagaccgtgctggacatgcggagcatggacttcaagagcaactccgccgtggcctggtccaacaagtccgatttcgcctgcgccaacgccttcaacaacagcattatccccgaggacacattcttcccaagccccgagagcagctgcggtaccacaacacctggcgagagaagtagcctgcctgccttctatcctggcaccagcggctcttgttctggctgtggatctctgagcctgcctctgctggctggactggttgctgctgatgctgtggcctctctgctgattgtgggagccgtgttcaggagtaagaggagcaggctcctgcacagtgactacatgaacatgactccacgccgccccggacccacccgcaagcattaccagccctatgccccaccacgcgacttcgcagcctatcgctccctgtgcgccagacctagaagaagccccgctcaagaggacggcaaggtgtacatcaacatgcccggcagaggataa

SEQ ID NO: 9409 - DNA, 2148 bp, Artificial Sequence
  Synthetic Polynucleotide
atggccttaccagtgaccgccttgctcctgccgctggccttgctgctccacgccgccaggccggaattcaatgctggcgtgacccagacacctaagttccaggtgctgaaaaccggccagagcatgaccctgcaatgcgcccaggacatgaaccatgagtacatgagctggtacagacaggaccccggcatgggcctgagactgatccactactctgtggctatccagaccaccgaccagggcgaagtgcccaatggctacaacgtgtccagaagcaccatcgaggacttcccactgagactgctgtctgccgctcctagccagaccagcgtgtacttttgtgccagcagctacctgggcaacaccggcgagctgttttttggcgagggcagcagactgaccgtgctcgaggacctgaagaacgtgttcccacctgaggtggccgtgttcgagcctagcgaggccgagatcagccacacccagaaagccaccctcgtgtgcctggctaccggcttctaccccgaccatgtggaactgtcttggtgggtcaacggcaaagaggtgcacagcggcgtgtctaccgacccccagccactgaaagaacagcccgccctgaacgacagccggtactgcctgagcagcagactgagagtgtccgccaccttctggcagaacccccggaaccacttcagatgccaggtgcagttctacggcctgagcgagaacgacgagtggacccaggacagagccaagcccgtgacccagatcgtgtctgccgaagcctggggcagagccgattgcggatccacaacacctggcgagagaagtagcctgcctgccttctatcctggcaccagcggctcttgttctggctgtggatctctgagcctgcctctgctggctggactggttgctgctgatgctgtggcctctctgctgattgtgggagccgtgttcctgtgcgccagacctagaagaagccccgctcaagaggacggcaaggtgtacatcaacatgcccggcagaggaagggccaagcgatctggatctggagcaacaaacttctcactactcaaacaagcaggtgacgtggaggagaatcccgggcctactagtatggactggatttggcgcatccttttccttgtcggcgctgctaccggcgcgcattccttcgaacaagaagtgacacagatccctgccgctctgtctgtgcctgagggcgaaaacctggtgctgaactgctccttcaccgacagcgccatctacaacctccagtggttcaggcaggaccctggaaagggactgacaagcctgctgctgatccagagcagccagagagagcagacctccggcagactgaatgccagcctggataagagcagcggcaggtctaccctgtatatcgccgcttctcagcctggcgatagcgccacatatctgtgtgctgtgcggcctacaagcggcggcagctacatccctacatttggcagaggcaccagcctgatcgtgcacccttatacgcgtatccagaaccctgatcctgccgtgtaccagctgcgggatagcaagagcagcgacaagagcgtgtgtctgttcaccgacttcgacagccagaccaacgtgtcccagagcaaggactccgacgtgtacatcaccgataagaccgtgctggacatgcggagcatggacttcaagagcaactccgccgtggcctggtccaacaagtccgatttcgcctgcgccaacgccttcaacaacagcattatccccgaggacacattcttcccaagccccgagagcagctgcggtaccacaacacctggcgagagaagtagcctgcctgccttctatcctggcaccagcggctcttgttctggctgtggatctctgagcctgcctctgctggctggactggttgctgctgatgctgtggcctctctgctgattgtgggagccgtgttcagggaccaaagactgcctcctgacgctcacaaacctccaggcggaggcagcttcagaacccctatccaagaggaacaggctgacgcccacagcaccctggcaaaaattctgtgcgccagacctagaagaagccccgctcaagaggacggcaaggtgtacatcaacatgcccggcagaggataa

SEQ ID NO: 9410 - DNA, 2400 bp, Artificial Sequence
  Synthetic Polynucleotide
atggccttaccagtgaccgccttgctcctgccgctggccttgctgctccacgccgccaggccggaattcaatgctggcgtgacccagacacctaagttccaggtgctgaaaaccggccagagcatgaccctgcaatgcgcccaggacatgaaccatgagtacatgagctggtacagacaggaccccggcatgggcctgagactgatccactactctgtggctatccagaccaccgaccagggcgaagtgcccaatggctacaacgtgtccagaagcaccatcgaggacttcccactgagactgctgtctgccgctcctagccagaccagcgtgtacttttgtgccagcagctacctgggcaacaccggcgagctgttttttggcgagggcagcagactgaccgtgctcgaggacctgaagaacgtgttcccacctgaggtggccgtgttcgagcctagcgaggccgagatcagccacacccagaaagccaccctcgtgtgcctggctaccggcttctaccccgaccatgtggaactgtcttggtgggtcaacggcaaagaggtgcacagcggcgtgtctaccgacccccagccactgaaagaacagcccgccctgaacgacagccggtactgcctgagcagcagactgagagtgtccgccaccttctggcagaacccccggaaccacttcagatgccaggtgcagttctacggcctgagcgagaacgacgagtggacccaggacagagccaagcccgtgacccagatcgtgtctgccgaagcctggggcagagccgattgcggatccacaacacctggcgagagaagtagcctgcctgccttctatcctggcaccagcggctcttgttctggctgtggatctctgagcctgcctctgctggctggactggttgctgctgatgctgtggcctctctgctgattgtgggagccgtgttcctgtgcgccagacctagaagaagccccgctcaagaggacggcaaggtgtacatcaacatgcccggcagaggaagggccaagcgatctggatctggagcaacaaacttctcactactcaaacaagcaggtgacgtggaggagaatcccgggcctactagtatggactggatttggcgcatccttttccttgtcggcgctgctaccggcgcgcattccttcgaacaagaagtgacacagatccctgccgctctgtctgtgcctgagggcgaaaacctggtgctgaactgctccttcaccgacagcgccatctacaacctccagtggttcaggcaggaccctggaaagggactgacaagcctgctgctgatccagagcagccagagagagcagacctccggcagactgaatgccagcctggataagagcagcggcaggtctaccctgtatatcgccgcttctcagcctggcgatagcgccacatatctgtgtgctgtgcggcctacaagcggcggcagctacatccctacatttggcagaggcaccagcctgatcgtgcacccttatacgcgtatccagaaccctgatcctgccgtgtaccagctgcgggatagcaagagcagcgacaagagcgtgtgtctgttcaccgacttcgacagccagaccaacgtgtcccagagcaaggactccgacgtgtacatcaccgataagaccgtgctggacatgcggagcatggacttcaagagcaactccgccgtggcctggtccaacaagtccgatttcgcctgcgccaacgccttcaacaacagcattatccccgaggacacattcttcccaagccccgagagcagctgcggtaccacaacacctggcgagagaagtagcctgcctgccttctatcctggcaccagcggctcttgttctggctgtggatctctgagcctgcctctgctggctggactggttgctgctgatgctgtggcctctctgctgattgtgggagccgtgttctggcggcggaagcggaaagagaagcagtctgagacaagccccaaagagttcctgaccatctacgaggacgtgaaggacctgaaaacccggcggaaccacgaacaagagcagacctttcctggcggaggcagcaccatctacagcatgatccagagccagagcagcgcccctacaagccaagagcctgcctacacactgtactccctgatccagcctagcagaaagagcggcagccggaagagaaatcacagccccagcttcaacagcacgatctacgaagtgatcggcaagagccagccaaaggctcagaaccctgccagactgagccggaaagagctggaaaacttcgacgtgtacagcctgtgcgccagacctagaagaagccccgctcaagaggacggcaaggtgtacatcaacatgcccggcagaggataa

SEQ ID NO: 9411 - DNA, 2253 bp, Artificial Sequence
  Synthetic Polynucleotide
atggccttaccagtgaccgccttgctcctgccgctggccttgctgctccacgccgccaggccggaattcaatgctggcgtgacccagacacctaagttccaggtgctgaaaaccggccagagcatgaccctgcaatgcgcccaggacatgaaccatgagtacatgagctggtacagacaggaccccggcatgggcctgagactgatccactactctgtggctatccagaccaccgaccagggcgaagtgcccaatggctacaacgtgtccagaagcaccatcgaggacttcccactgagactgctgtctgccgctcctagccagaccagcgtgtacttttgtgccagcagctacctgggcaacaccggcgagctgttttttggcgagggcagcagactgaccgtgctcgaggacctgaagaacgtgttcccacctgaggtggccgtgttcgagcctagcgaggccgagatcagccacacccagaaagccaccctcgtgtgcctggctaccggcttctaccccgaccatgtggaactgtcttggtgggtcaacggcaaagaggtgcacagcggcgtgtctaccgacccccagccactgaaagaacagcccgccctgaacgacagccggtactgcctgagcagcagactgagagtgtccgccaccttctggcagaacccccggaaccacttcagatgccaggtgcagttctacggcctgagcgagaacgacgagtggacccaggacagagccaagcccgtgacccagatcgtgtctgccgaagcctggggcagagccgattgcggatccctgggagagcctcagctgtgctatatcctggacgccatcctgtttctgtacggcatcgtgctgaccctgctgtactgcaaacggggcagaaagaaactcctgtatatattcaaacaaccatttatgagaccagtacaaactactcaagaggaagatggctgtagctgccgatttccagaagaagaagaaggaggatgtgaactgcggctgaagatccaagtgcggaaggccgccatcaccagctacgagaaatccgacggcgtgtacaccggcctgagcaccagaaatcaagagacatacgagacactgaagcacgaaaagcctccacaaagggccaagcgatctggatctggagcaacaaacttctcactactcaaacaagcaggtgacgtggaggagaatcccgggcctactagtatggactggatttggcgcatccttttccttgtcggcgctgctaccggcgcgcattccttcgaacaagaagtgacacagatccctgccgctctgtctgtgcctgagggcgaaaacctggtgctgaactgctccttcaccgacagcgccatctacaacctccagtggttcaggcaggaccctggaaagggactgacaagcctgctgctgatccagagcagccagagagagcagacctccggcagactgaatgccagcctggataagagcagcggcaggtctaccctgtatatcgccgcttctcagcctggcgatagcgccacatatctgtgtgctgtgcggcctacaagcggcggcagctacatccctacatttggcagaggcaccagcctgatcgtgcacccttatacgcgtatccagaaccctgatcctgccgtgtaccagctgcgggatagcaagagcagcgacaagagcgtgtgtctgttcaccgacttcgacagccagaccaacgtgtcccagagcaaggactccgacgtgtacatcaccgataagaccgtgctggacatgcggagcatggacttcaagagcaactccgccgtggcctggtccaacaagtccgatttcgcctgcgccaacgccttcaacaacagcattatccccgaggacacattcttcccaagccccgagagcagctgcggtaccctgggagagcctcagctgtgctatatcctggacgccatcctgtttctgtacggcatcgtgctgaccctgctgtactgcaggagtaagaggagcaggctcctgcacagtgactacatgaacatgactccacgccgccccggacccacccgcaagcattaccagccctatgccccaccacgcgacttcgcagcctatcgctcccggctgaagatccaagtgcggaaggccgccatcaccagctacgagaaatccgacggcgtgtacaccggcctgagcaccagaaatcaagagacatacgagacactgaagcacgaaaagcctccacaataa

SEQ ID NO: 9412 - DNA, 2238 bp, Artificial Sequence
  Synthetic Polynucleotide
atggccttaccagtgaccgccttgctcctgccgctggccttgctgctccacgccgccaggccggaattcaatgctggcgtgacccagacacctaagttccaggtgctgaaaaccggccagagcatgaccctgcaatgcgcccaggacatgaaccatgagtacatgagctggtacagacaggaccccggcatgggcctgagactgatccactactctgtggctatccagaccaccgaccagggcgaagtgcccaatggctacaacgtgtccagaagcaccatcgaggacttcccactgagactgctgtctgccgctcctagccagaccagcgtgtacttttgtgccagcagctacctgggcaacaccggcgagctgttttttggcgagggcagcagactgaccgtgctcgaggacctgaagaacgtgttcccacctgaggtggccgtgttcgagcctagcgaggccgagatcagccacacccagaaagccaccctcgtgtgcctggctaccggcttctaccccgaccatgtggaactgtcttggtgggtcaacggcaaagaggtgcacagcggcgtgtctaccgacccccagccactgaaagaacagcccgccctgaacgacagccggtactgcctgagcagcagactgagagtgtccgccaccttctggcagaacccccggaaccacttcagatgccaggtgcagttctacggcctgagcgagaacgacgagtggacccaggacagagccaagcccgtgacccagatcgtgtctgccgaagcctggggcagagccgattgcggatccctgggagagcctcagctgtgctatatcctggacgccatcctgtttctgtacggcatcgtgctgaccctgctgtactgcaaacggggcagaaagaaactcctgtatatattcaaacaaccatttatgagaccagtacaaactactcaagaggaagatggctgtagctgccgatttccagaagaagaagaaggaggatgtgaactgcggctgaagatccaagtgcggaaggccgccatcaccagctacgagaaatccgacggcgtgtacaccggcctgagcaccagaaatcaagagacatacgagacactgaagcacgaaaagcctccacaaagggccaagcgatctggatctggagcaacaaacttctcactactcaaacaagcaggtgacgtggaggagaatcccgggcctactagtatggactggatttggcgcatccttttccttgtcggcgctgctaccggcgcgcattccttcgaacaagaagtgacacagatccctgccgctctgtctgtgcctgagggcgaaaacctggtgctgaactgctccttcaccgacagcgccatctacaacctccagtggttcaggcaggaccctggaaagggactgacaagcctgctgctgatccagagcagccagagagagcagacctccggcagactgaatgccagcctggataagagcagcggcaggtctaccctgtatatcgccgcttctcagcctggcgatagcgccacatatctgtgtgctgtgcggcctacaagcggcggcagctacatccctacatttggcagaggcaccagcctgatcgtgcacccttatacgcgtatccagaaccctgatcctgccgtgtaccagctgcgggatagcaagagcagcgacaagagcgtgtgtctgttcaccgacttcgacagccagaccaacgtgtcccagagcaaggactccgacgtgtacatcaccgataagaccgtgctggacatgcggagcatggacttcaagagcaactccgccgtggcctggtccaacaagtccgatttcgcctgcgccaacgccttcaacaacagcattatccccgaggacacattcttcccaagccccgagagcagctgcggtaccctgggagagcctcagctgtgctatatcctggacgccatcctgtttctgtacggcatcgtgctgaccctgctgtactgcagggaccaaagactgcctcctgacgctcacaaacctccaggcggaggcagcttcagaacccctatccaagaggaacaggctgacgcccacagcaccctggcaaaaattcggctgaagatccaagtgcggaaggccgccatcaccagctacgagaaatccgacggcgtgtacaccggcctgagcaccagaaatcaagagacatacgagacactgaagcacgaaaagcctccacaataa

SEQ ID NO: 9413 - DNA, 2490 bp, Artificial Sequence
  Synthetic Polynucleotide
atggccttaccagtgaccgccttgctcctgccgctggccttgctgctccacgccgccaggccggaattcaatgctggcgtgacccagacacctaagttccaggtgctgaaaaccggccagagcatgaccctgcaatgcgcccaggacatgaaccatgagtacatgagctggtacagacaggaccccggcatgggcctgagactgatccactactctgtggctatccagaccaccgaccagggcgaagtgcccaatggctacaacgtgtccagaagcaccatcgaggacttcccactgagactgctgtctgccgctcctagccagaccagcgtgtacttttgtgccagcagctacctgggcaacaccggcgagctgttttttggcgagggcagcagactgaccgtgctcgaggacctgaagaacgtgttcccacctgaggtggccgtgttcgagcctagcgaggccgagatcagccacacccagaaagccaccctcgtgtgcctggctaccggcttctaccccgaccatgtggaactgtcttggtgggtcaacggcaaagaggtgcacagcggcgtgtctaccgacccccagccactgaaagaacagcccgccctgaacgacagccggtactgcctgagcagcagactgagagtgtccgccaccttctggcagaacccccggaaccacttcagatgccaggtgcagttctacggcctgagcgagaacgacgagtggacccaggacagagccaagcccgtgacccagatcgtgtctgccgaagcctggggcagagccgattgcggatccctgggagagcctcagctgtgctatatcctggacgccatcctgtttctgtacggcatcgtgctgaccctgctgtactgcaaacggggcagaaagaaactcctgtatatattcaaacaaccatttatgagaccagtacaaactactcaagaggaagatggctgtagctgccgatttccagaagaagaagaaggaggatgtgaactgcggctgaagatccaagtgcggaaggccgccatcaccagctacgagaaatccgacggcgtgtacaccggcctgagcaccagaaatcaagagacatacgagacactgaagcacgaaaagcctccacaaagggccaagcgatctggatctggagcaacaaacttctcactactcaaacaagcaggtgacgtggaggagaatcccgggcctactagtatggactggatttggcgcatccttttccttgtcggcgctgctaccggcgcgcattccttcgaacaagaagtgacacagatccctgccgctctgtctgtgcctgagggcgaaaacctggtgctgaactgctccttcaccgacagcgccatctacaacctccagtggttcaggcaggaccctggaaagggactgacaagcctgctgctgatccagagcagccagagagagcagacctccggcagactgaatgccagcctggataagagcagcggcaggtctaccctgtatatcgccgcttctcagcctggcgatagcgccacatatctgtgtgctgtgcggcctacaagcggcggcagctacatccctacatttggcagaggcaccagcctgatcgtgcacccttatacgcgtatccagaaccctgatcctgccgtgtaccagctgcgggatagcaagagcagcgacaagagcgtgtgtctgttcaccgacttcgacagccagaccaacgtgtcccagagcaaggactccgacgtgtacatcaccgataagaccgtgctggacatgcggagcatggacttcaagagcaactccgccgtggcctggtccaacaagtccgatttcgcctgcgccaacgccttcaacaacagcattatccccgaggacacattcttcccaagccccgagagcagctgcggtaccctgggagagcctcagctgtgctatatcctggacgccatcctgtttctgtacggcatcgtgctgaccctgctgtactgctggcggcggaagcggaaagagaagcagtctgagacaagccccaaagagttcctgaccatctacgaggacgtgaaggacctgaaaacccggcggaaccacgaacaagagcagacctttcctggcggaggcagcaccatctacagcatgatccagagccagagcagcgcccctacaagccaagagcctgcctacacactgtactccctgatccagcctagcagaaagagcggcagccggaagagaaatcacagccccagcttcaacagcacgatctacgaagtgatcggcaagagccagccaaaggctcagaaccctgccagactgagccggaaagagctggaaaacttcgacgtgtacagccggctgaagatccaagtgcggaaggccgccatcaccagctacgagaaatccgacggcgtgtacaccggcctgagcaccagaaatcaagagacatacgagacactgaagcacgaaaagcctccacaataa

SEQ ID NO: 9414 - DNA, 2256 bp, Artificial Sequence
  Synthetic Polynucleotide
atggccttaccagtgaccgccttgctcctgccgctggccttgctgctccacgccgccaggccggaattcaatgctggcgtgacccagacacctaagttccaggtgctgaaaaccggccagagcatgaccctgcaatgcgcccaggacatgaaccatgagtacatgagctggtacagacaggaccccggcatgggcctgagactgatccactactctgtggctatccagaccaccgaccagggcgaagtgcccaatggctacaacgtgtccagaagcaccatcgaggacttcccactgagactgctgtctgccgctcctagccagaccagcgtgtacttttgtgccagcagctacctgggcaacaccggcgagctgttttttggcgagggcagcagactgaccgtgctcgaggacctgaagaacgtgttcccacctgaggtggccgtgttcgagcctagcgaggccgagatcagccacacccagaaagccaccctcgtgtgcctggctaccggcttctaccccgaccatgtggaactgtcttggtgggtcaacggcaaagaggtgcacagcggcgtgtctaccgacccccagccactgaaagaacagcccgccctgaacgacagccggtactgcctgagcagcagactgagagtgtccgccaccttctggcagaacccccggaaccacttcagatgccaggtgcagttctacggcctgagcgagaacgacgagtggacccaggacagagccaagcccgtgacccagatcgtgtctgccgaagcctggggcagagccgattgcggatccctgggagagcctcagctgtgctatatcctggacgccatcctgtttctgtacggcatcgtgctgaccctgctgtactgcaaacggggcagaaagaaactcctgtatatattcaaacaaccatttatgagaccagtacaaactactcaagaggaagatggctgtagctgccgatttccagaagaagaagaaggaggatgtgaactgcggctgaagatccaagtgcggaaggccgccatcaccagctacgagaaatccgacggcgtgtacaccggcctgagcaccagaaatcaagagacatacgagacactgaagcacgaaaagcctccacaaagggccaagcgatctggatctggagcaacaaacttctcactactcaaacaagcaggtgacgtggaggagaatcccgggcctactagtatggactggatttggcgcatccttttccttgtcggcgctgctaccggcgcgcattccttcgaacaagaagtgacacagatccctgccgctctgtctgtgcctgagggcgaaaacctggtgctgaactgctccttcaccgacagcgccatctacaacctccagtggttcaggcaggaccctggaaagggactgacaagcctgctgctgatccagagcagccagagagagcagacctccggcagactgaatgccagcctggataagagcagcggcaggtctaccctgtatatcgccgcttctcagcctggcgatagcgccacatatctgtgtgctgtgcggcctacaagcggcggcagctacatccctacatttggcagaggcaccagcctgatcgtgcacccttatacgcgtatccagaaccctgatcctgccgtgtaccagctgcgggatagcaagagcagcgacaagagcgtgtgtctgttcaccgacttcgacagccagaccaacgtgtcccagagcaaggactccgacgtgtacatcaccgataagaccgtgctggacatgcggagcatggacttcaagagcaactccgccgtggcctggtccaacaagtccgatttcgcctgcgccaacgccttcaacaacagcattatccccgaggacacattcttcccaagccccgagagcagctgcggtaccctcggagaaccacagctctgttacattctggatgctatcctgttcctctatgggatcgtcctgacactcctgtattgcaagagaggccggaagaagctgctgtacatcttcaagcagcctttcatgcggcccgtgcagaccacccaggaagaggacggctgctcctgccggttccccgaggaagaagaaggcggctgcgagctgagactcaaaattcaagttcgcaaagccgccattacctcttacgagaagagtgatggggtgtacacaggactgtctacccggaatcaagaaacctacgaaaccctcaaacatgagaagccacctcagtaa

SEQ ID NO: 9415 - DNA, 2253 bp, Artificial Sequence
  Synthetic Polynucleotide
atggccttaccagtgaccgccttgctcctgccgctggccttgctgctccacgccgccaggccggaattcaatgctggcgtgacccagacacctaagttccaggtgctgaaaaccggccagagcatgaccctgcaatgcgcccaggacatgaaccatgagtacatgagctggtacagacaggaccccggcatgggcctgagactgatccactactctgtggctatccagaccaccgaccagggcgaagtgcccaatggctacaacgtgtccagaagcaccatcgaggacttcccactgagactgctgtctgccgctcctagccagaccagcgtgtacttttgtgccagcagctacctgggcaacaccggcgagctgttttttggcgagggcagcagactgaccgtgctcgaggacctgaagaacgtgttcccacctgaggtggccgtgttcgagcctagcgaggccgagatcagccacacccagaaagccaccctcgtgtgcctggctaccggcttctaccccgaccatgtggaactgtcttggtgggtcaacggcaaagaggtgcacagcggcgtgtctaccgacccccagccactgaaagaacagcccgccctgaacgacagccggtactgcctgagcagcagactgagagtgtccgccaccttctggcagaacccccggaaccacttcagatgccaggtgcagttctacggcctgagcgagaacgacgagtggacccaggacagagccaagcccgtgacccagatcgtgtctgccgaagcctggggcagagccgattgcggatccctgggagagcctcagctgtgctatatcctggacgccatcctgtttctgtacggcatcgtgctgaccctgctgtactgcaaacggggcagaaagaaactcctgtatatattcaaacaaccatttatgagaccagtacaaactactcaagaggaagatggctgtagctgccgatttccagaagaagaagaaggaggatgtgaactgcggctgaagatccaagtgcggaaggccgccatcaccagctacgagaaatccgacggcgtgtacaccggcctgagcaccagaaatcaagagacatacgagacactgaagcacgaaaagcctccacaaagggccaagcgatctggatctggagcaacaaacttctcactactcaaacaagcaggtgacgtggaggagaatcccgggcctactagtatggactggatttggcgcatccttttccttgtcggcgctgctaccggcgcgcattccttcgaacaagaagtgacacagatccctgccgctctgtctgtgcctgagggcgaaaacctggtgctgaactgctccttcaccgacagcgccatctacaacctccagtggttcaggcaggaccctggaaagggactgacaagcctgctgctgatccagagcagccagagagagcagacctccggcagactgaatgccagcctggataagagcagcggcaggtctaccctgtatatcgccgcttctcagcctggcgatagcgccacatatctgtgtgctgtgcggcctacaagcggcggcagctacatccctacatttggcagaggcaccagcctgatcgtgcacccttatacgcgtatccagaaccctgatcctgccgtgtaccagctgcgggatagcaagagcagcgacaagagcgtgtgtctgttcaccgacttcgacagccagaccaacgtgtcccagagcaaggactccgacgtgtacatcaccgataagaccgtgctggacatgcggagcatggacttcaagagcaactccgccgtggcctggtccaacaagtccgatttcgcctgcgccaacgccttcaacaacagcattatccccgaggacacattcttcccaagccccgagagcagctgcggtaccctcggagaaccacagctctgttacattctggatgctatcctgttcctctatgggatcgtcctgacactcctgtattgcaggagcaagcggtcacggctgctccacagcgattacatgaatatgacaccacgaagaccgggtcctactcgcaaacactaccaaccctacgcacctccccgcgactttgcagcgtaccgatctagactcaaaattcaagttcgcaaagccgccattacctcttacgagaagagtgatggggtgtacacaggactgtctacccggaatcaagaaacctacgaaaccctcaaacatgagaagccacctcagtaa

SEQ ID NO: 9416 - DNA, 2250 bp, Artificial Sequence
  Synthetic Polynucleotide
atggccttaccagtgaccgccttgctcctgccgctggccttgctgctccacgccgccaggccggaattcaatgctggcgtgacccagacacctaagttccaggtgctgaaaaccggccagagcatgaccctgcaatgcgcccaggacatgaaccatgagtacatgagctggtacagacaggaccccggcatgggcctgagactgatccactactctgtggctatccagaccaccgaccagggcgaagtgcccaatggctacaacgtgtccagaagcaccatcgaggacttcccactgagactgctgtctgccgctcctagccagaccagcgtgtacttttgtgccagcagctacctgggcaacaccggcgagctgttttttggcgagggcagcagactgaccgtgctcgaggacctgaagaacgtgttcccacctgaggtggccgtgttcgagcctagcgaggccgagatcagccacacccagaaagccaccctcgtgtgcctggctaccggcttctaccccgaccatgtggaactgtcttggtgggtcaacggcaaagaggtgcacagcggcgtgtctaccgacccccagccactgaaagaacagcccgccctgaacgacagccggtactgcctgagcagcagactgagagtgtccgccaccttctggcagaacccccggaaccacttcagatgccaggtgcagttctacggcctgagcgagaacgacgagtggacccaggacagagccaagcccgtgacccagatcgtgtctgccgaagcctggggcagagccgattgcggatccctgggagagcctcagctgtgctatatcctggacgccatcctgtttctgtacggcatcgtgctgaccctgctgtactgcaggagtaagaggagcaggctcctgcacagtgactacatgaacatgactccacgccgccccggacccacccgcaagcattaccagccctatgccccaccacgcgacttcgcagcctatcgctcccggctgaagatccaagtgcggaaggccgccatcaccagctacgagaaatccgacggcgtgtacaccggcctgagcaccagaaatcaagagacatacgagacactgaagcacgaaaagcctccacaaagggccaagcgatctggatctggagcaacaaacttctcactactcaaacaagcaggtgacgtggaggagaatcccgggcctactagtatggactggatttggcgcatccttttccttgtcggcgctgctaccggcgcgcattccttcgaacaagaagtgacacagatccctgccgctctgtctgtgcctgagggcgaaaacctggtgctgaactgctccttcaccgacagcgccatctacaacctccagtggttcaggcaggaccctggaaagggactgacaagcctgctgctgatccagagcagccagagagagcagacctccggcagactgaatgccagcctggataagagcagcggcaggtctaccctgtatatcgccgcttctcagcctggcgatagcgccacatatctgtgtgctgtgcggcctacaagcggcggcagctacatccctacatttggcagaggcaccagcctgatcgtgcacccttatacgcgtatccagaaccctgatcctgccgtgtaccagctgcgggatagcaagagcagcgacaagagcgtgtgtctgttcaccgacttcgacagccagaccaacgtgtcccagagcaaggactccgacgtgtacatcaccgataagaccgtgctggacatgcggagcatggacttcaagagcaactccgccgtggcctggtccaacaagtccgatttcgcctgcgccaacgccttcaacaacagcattatccccgaggacacattcttcccaagccccgagagcagctgcggtaccctcggagaaccacagctctgttacattctggatgctatcctgttcctctatgggatcgtcctgacactcctgtattgcaggagcaagcggtcacggctgctccacagcgattacatgaatatgacaccacgaagaccgggtcctactcgcaaacactaccaaccctacgcacctccccgcgactttgcagcgtaccgatctagactcaaaattcaagttcgcaaagccgccattacctcttacgagaagagtgatggggtgtacacaggactgtctacccggaatcaagaaacctacgaaaccctcaaacatgagaagccacctcagtaa

SEQ ID NO: 9417 - DNA, 2004 bp, Artificial Sequence
  Synthetic Polynucleotide
atggccttaccagtgaccgccttgctcctgccgctggccttgctgctccacgccgccaggccggaattcaatgctggcgtgacccagacacctaagttccaggtgctgaaaaccggccagagcatgaccctgcaatgcgcccaggacatgaaccatgagtacatgagctggtacagacaggaccccggcatgggcctgagactgatccactactctgtggctatccagaccaccgaccagggcgaagtgcccaatggctacaacgtgtccagaagcaccatcgaggacttcccactgagactgctgtctgccgctcctagccagaccagcgtgtacttttgtgccagcagctacctgggcaacaccggcgagctgttttttggcgagggcagcagactgaccgtgctcgaggacctgaagaacgtgttcccacctgaggtggccgtgttcgagcctagcgaggccgagatcagccacacccagaaagccaccctcgtgtgcctggctaccggcttctaccccgaccatgtggaactgtcttggtgggtcaacggcaaagaggtgcacagcggcgtgtctaccgacccccagccactgaaagaacagcccgccctgaacgacagccggtactgcctgagcagcagactgagagtgtccgccaccttctggcagaacccccggaaccacttcagatgccaggtgcagttctacggcctgagcgagaacgacgagtggacccaggacagagccaagcccgtgacccagatcgtgtctgccgaagcctggggcagagccgattgcggatccctgggagagcctcagctgagctatatcctggacgccatcctgtttctgtacggcatcgtgctgaccctgctgtactgccggctgaagatccaagtgcggaaggccgccatcaccagctacgagaaatccgacggcgtgtacaccggcctgagcaccagaaatcaagagacatacgagacactgaagcacgaaaagcctccacaaagggccaagcgatctggatctggagcaacaaacttctcactactcaaacaagcaggtgacgtggaggagaatcccgggcctactagtatggactggatttggcgcatccttttccttgtcggcgctgctaccggcgcgcattccttcgaacaagaagtgacacagatccctgccgctctgtctgtgcctgagggcgaaaacctggtgctgaactgctccttcaccgacagcgccatctacaacctccagtggttcaggcaggaccctggaaagggactgacaagcctgctgctgatccagagcagccagagagagcagacctccggcagactgaatgccagcctggataagagcagcggcaggtctaccctgtatatcgccgcttctcagcctggcgatagcgccacatatctgtgtgctgtgcggcctacaagcggcggcagctacatccctacatttggcagaggcaccagcctgatcgtgcacccttatacgcgtatccagaaccctgatcctgccgtgtaccagctgcgggatagcaagagcagcgacaagagcgtgtgtctgttcaccgacttcgacagccagaccaacgtgtcccagagcaaggactccgacgtgtacatcaccgataagaccgtgctggacatgcggagcatggacttcaagagcaactccgccgtggcctggtccaacaagtccgatttcgcctgcgccaacgccttcaacaacagcattatccccgaggacacattcttcccaagccccgagagcagctgcggtaccctcggagaaccacagctctcttacattctggatgctatcctgttcctctatgggatcgtcctgacactcctgtattgcagactcaaaattcaagttcgcaaagccgccattacctcttacgagaagagtgatggggtgtacacaggactgtctacccggaatcaagaaacctacgaaaccctcaaacatgagaagccacctcagtaa

SEQ ID NO: 9418 - DNA, 2112 bp, Artificial Sequence
  Synthetic Polynucleotide
atggccttaccagtgaccgccttgctcctgccgctggccttgctgctccacgccgccaggccggaattcaatgctggcgtgacccagacacctaagttccaggtgctgaaaaccggccagagcatgaccctgcaatgcgcccaggacatgaaccatgagtacatgagctggtacagacaggaccccggcatgggcctgagactgatccactactctgtggctatccagaccaccgaccagggcgaagtgcccaatggctacaacgtgtccagaagcaccatcgaggacttcccactgagactgctgtctgccgctcctagccagaccagcgtgtacttttgtgccagcagctacctgggcaacaccggcgagctgttttttggcgagggcagcagactgaccgtgctcgaggacctgaagaacgtgttcccacctgaggtggccgtgttcgagcctagcgaggccgagatcagccacacccagaaagccaccctcgtgtgcctggctaccggcttctaccccgaccatgtggaactgtcttggtgggtcaacggcaaagaggtgcacagcggcgtgtctaccgacccccagccactgaaagaacagcccgccctgaacgacagccggtactgcctgagcagcagactgagagtgtccgccaccttctggcagaacccccggaaccacttcagatgccaggtgcagttctacggcctgagcgagaacgacgagtggacccaggacagagccaagcccgtgacccagatcgtgtctgccgaagcctggggcagagccgattgcggatcccaggctcagagcgattgcagctgtagcacagtgtctccaggcgtgctggccggaattgtgatgggcgatctggtgctgacagtgctgattgccctggccgtgtacttcctgggtagactggtgcctagaggaagaggcgctgccgaagccgccacaagaaagcagagaatcaccgagacagagagcccctaccaagagctgcaaggccagagaagcgacgtgtacagcgacctgaatacccagcggccttactacaaaagggccaagcgatctggatctggagcaacaaacttctcactactcaaacaagcaggtgacgtggaggagaatcccgggcctactagtatggactggatttggcgcatccttttccttgtcggcgctgctaccggcgcgcattccttcgaacaagaagtgacacagatccctgccgctctgtctgtgcctgagggcgaaaacctggtgctgaactgctccttcaccgacagcgccatctacaacctccagtggttcaggcaggaccctggaaagggactgacaagcctgctgctgatccagagcagccagagagagcagacctccggcagactgaatgccagcctggataagagcagcggcaggtctaccctgtatatcgccgcttctcagcctggcgatagcgccacatatctgtgtgctgtgcggcctacaagcggcggcagctacatccctacatttggcagaggcaccagcctgatcgtgcacccttatacgcgtatccagaaccctgatcctgccgtgtaccagctgcgggatagcaagagcagcgacaagagcgtgtgtctgttcaccgacttcgacagccagaccaacgtgtcccagagcaaggactccgacgtgtacatcaccgataagaccgtgctggacatgcggagcatggacttcaagagcaactccgccgtggcctggtccaacaagtccgatttcgcctgcgccaacgccttcaacaacagcattatccccgaggacacattcttcccaagccccgagagcagctgcggtacccaggctcagagcgattgcagctctagcacagtgtctccaggcgtgctggccggaattgtgatgggcgatctggtgctgacagtgctgattgccctggccgtgtacttcctgggtagactggtgcctagaggaagaggcgctgccgaagccgccacaagaaagcagagaatcaccgagacagagagcccctaccaagagctgcaaggccagagaagcgacgtgtacagcgacctgaatacccagcggccttactacaaataa

SEQ ID NO: 9419 - DNA, 2238 bp, Artificial Sequence
  Synthetic Polynucleotide
atggccttaccagtgaccgccttgctcctgccgctggccttgctgctccacgccgccaggccggaattcaatgctggcgtgacccagacacctaagttccaggtgctgaaaaccggccagagcatgaccctgcaatgcgcccaggacatgaaccatgagtacatgagctggtacagacaggaccccggcatgggcctgagactgatccactactctgtggctatccagaccaccgaccagggcgaagtgcccaatggctacaacgtgtccagaagcaccatcgaggacttcccactgagactgctgtctgccgctcctagccagaccagcgtgtacttttgtgccagcagctacctgggcaacaccggcgagctgttttttggcgagggcagcagactgaccgtgctcgaggacctgaagaacgtgttcccacctgaggtggccgtgttcgagcctagcgaggccgagatcagccacacccagaaagccaccctcgtgtgcctggctaccggcttctaccccgaccatgtggaactgtcttggtgggtcaacggcaaagaggtgcacagcggcgtgtctaccgacccccagccactgaaagaacagcccgccctgaacgacagccggtactgcctgagcagcagactgagagtgtccgccaccttctggcagaacccccggaaccacttcagatgccaggtgcagttctacggcctgagcgagaacgacgagtggacccaggacagagccaagcccgtgacccagatcgtgtctgccgaagcctggggcagagccgattgcggatcccaggctcagagcgattgcagctgtagcacagtgtctccaggcgtgctggccggaattgtgatgggcgatctggtgctgacagtgctgattgccctggccgtgtacttcctgggtagactggtgcctagaggaagaggcgctgccgaagccgccacaagaaagcagagaatcaccgagacagagagcccctaccaagagctgcaaggccagagaagcgacgtgtacagcgacctgaatacccagcggccttactacaaaagggccaagcgatctggatctggagcaacaaacttctcactactcaaacaagcaggtgacgtggaggagaatcccgggcctactagtatggactggatttggcgcatccttttccttgtcggcgctgctaccggcgcgcattccttcgaacaagaagtgacacagatccctgccgctctgtctgtgcctgagggcgaaaacctggtgctgaactgctccttcaccgacagcgccatctacaacctccagtggttcaggcaggaccctggaaagggactgacaagcctgctgctgatccagagcagccagagagagcagacctccggcagactgaatgccagcctggataagagcagcggcaggtctaccctgtatatcgccgcttctcagcctggcgatagcgccacatatctgtgtgctgtgcggcctacaagcggcggcagctacatccctacatttggcagaggcaccagcctgatcgtgcacccttatacgcgtatccagaaccctgatcctgccgtgtaccagctgcgggatagcaagagcagcgacaagagcgtgtgtctgttcaccgacttcgacagccagaccaacgtgtcccagagcaaggactccgacgtgtacatcaccgataagaccgtgctggacatgcggagcatggacttcaagagcaactccgccgtggcctggtccaacaagtccgatttcgcctgcgccaacgccttcaacaacagcattatccccgaggacacattcttcccaagccccgagagcagctgcggtacccaggctcagagcgattgcagctgtagcacagtgtctccaggcgtgctggccggaattgtgatgggcgatctggtgctgacagtgctgattgccctggccgtgtacttcctgggtagactggtgcctagaggaagaggcgctgccgaagccgccacaagaaagcagagaatcaccgagacagagagcccctaccaagagctgcaaggccagagaagcgacgtgtacagcgacctgaatacccagaaacggggcagaaagaaactcctgtatatattcaaacaaccatttatgagaccagtacaaactactcaagaggaagatggctgtagctgccgatttccagaagaagaagaaggaggatgtgaactgcggccttactacaaataa

SEQ ID NO: 9420 - DNA, 2235 bp, Artificial Sequence
  Synthetic Polynucleotide
atggccttaccagtgaccgccttgctcctgccgctggccttgctgctccacgccgccaggccggaattcaatgctggcgtgacccagacacctaagttccaggtgctgaaaaccggccagagcatgaccctgcaatgcgcccaggacatgaaccatgagtacatgagctggtacagacaggaccccggcatgggcctgagactgatccactactctgtggctatccagaccaccgaccagggcgaagtgcccaatggctacaacgtgtccagaagcaccatcgaggacttcccactgagactgctgtctgccgctcctagccagaccagcgtgtacttttgtgccagcagctacctgggcaacaccggcgagctgttttttggcgagggcagcagactgaccgtgctcgaggacctgaagaacgtgttcccacctgaggtggccgtgttcgagcctagcgaggccgagatcagccacacccagaaagccaccctcgtgtgcctggctaccggcttctaccccgaccatgtggaactgtcttggtgggtcaacggcaaagaggtgcacagcggcgtgtctaccgacccccagccactgaaagaacagcccgccctgaacgacagccggtactgcctgagcagcagactgagagtgtccgccaccttctggcagaacccccggaaccacttcagatgccaggtgcagttctacggcctgagcgagaacgacgagtggacccaggacagagccaagcccgtgacccagatcgtgtctgccgaagcctggggcagagccgattgcggatcccaggctcagagcgattgcagctgtagcacagtgtctccaggcgtgctggccggaattgtgatgggcgatctggtgctgacagtgctgattgccctggccgtgtacttcctgggtagactggtgcctagaggaagaggcgctgccgaagccgccacaagaaagcagagaatcaccgagacagagagcccctaccaagagctgcaaggccagagaagcgacgtgtacagcgacctgaatacccagcggccttactacaaaagggccaagcgatctggatctggagcaacaaacttctcactactcaaacaagcaggtgacgtggaggagaatcccgggcctactagtatggactggatttggcgcatccttttccttgtcggcgctgctaccggcgcgcattccttcgaacaagaagtgacacagatccctgccgctctgtctgtgcctgagggcgaaaacctggtgctgaactgctccttcaccgacagcgccatctacaacctccagtggttcaggcaggaccctggaaagggactgacaagcctgctgctgatccagagcagccagagagagcagacctccggcagactgaatgccagcctggataagagcagcggcaggtctaccctgtatatcgccgcttctcagcctggcgatagcgccacatatctgtgtgctgtgcggcctacaagcggcggcagctacatccctacatttggcagaggcaccagcctgatcgtgcacccttatacgcgtatccagaaccctgatcctgccgtgtaccagctgcgggatagcaagagcagcgacaagagcgtgtgtctgttcaccgacttcgacagccagaccaacgtgtcccagagcaaggactccgacgtgtacatcaccgataagaccgtgctggacatgcggagcatggacttcaagagcaactccgccgtggcctggtccaacaagtccgatttcgcctgcgccaacgccttcaacaacagcattatccccgaggacacattcttcccaagccccgagagcagctgcggtacccaggctcagagcgattgcagctgtagcacagtgtctccaggcgtgctggccggaattgtgatgggcgatctggtgctgacagtgctgattgccctggccgtgtacttcctgggtagactggtgcctagaggaagaggcgctgccgaagccgccacaagaaagcagagaatcaccgagacagagagcccctaccaagagctgcaaggccagagaagcgacgtgtacagcgacctgaatacccagaggagcaagcggtcacggctgctccacagcgattacatgaatatgacaccacgaagaccgggtcctactcgcaaacactaccaaccctacgcacctccccgcgactttgcagcgtaccgatctcggccttactacaaataa

SEQ ID NO: 9421 - DNA, 2220 bp, Artificial Sequence
  Synthetic Polynucleotide
atggccttaccagtgaccgccttgctcctgccgctggccttgctgctccacgccgccaggccggaattcaatgctggcgtgacccagacacctaagttccaggtgctgaaaaccggccagagcatgaccctgcaatgcgcccaggacatgaaccatgagtacatgagctggtacagacaggaccccggcatgggcctgagactgatccactactctgtggctatccagaccaccgaccagggcgaagtgcccaatggctacaacgtgtccagaagcaccatcgaggacttcccactgagactgctgtctgccgctcctagccagaccagcgtgtacttttgtgccagcagctacctgggcaacaccggcgagctgttttttggcgagggcagcagactgaccgtgctcgaggacctgaagaacgtgttcccacctgaggtggccgtgttcgagcctagcgaggccgagatcagccacacccagaaagccaccctcgtgtgcctggctaccggcttctaccccgaccatgtggaactgtcttggtgggtcaacggcaaagaggtgcacagcggcgtgtctaccgacccccagccactgaaagaacagcccgccctgaacgacagccggtactgcctgagcagcagactgagagtgtccgccaccttctggcagaacccccggaaccacttcagatgccaggtgcagttctacggcctgagcgagaacgacgagtggacccaggacagagccaagcccgtgacccagatcgtgtctgccgaagcctggggcagagccgattgcggatcccaggctcagagcgattgcagctgtagcacagtgtctccaggcgtgctggccggaattgtgatgggcgatctggtgctgacagtgctgattgccctggccgtgtacttcctgggtagactggtgcctagaggaagaggcgctgccgaagccgccacaagaaagcagagaatcaccgagacagagagcccctaccaagagctgcaaggccagagaagcgacgtgtacagcgacctgaatacccagcggccttactacaaaagggccaagcgatctggatctggagcaacaaacttctcactactcaaacaagcaggtgacgtggaggagaatcccgggcctactagtatggactggatttggcgcatccttttccttgtcggcgctgctaccggcgcgcattccttcgaacaagaagtgacacagatccctgccgctctgtctgtgcctgagggcgaaaacctggtgctgaactgctccttcaccgacagcgccatctacaacctccagtggttcaggcaggaccctggaaagggactgacaagcctgctgctgatccagagcagccagagagagcagacctccggcagactgaatgccagcctggataagagcagcggcaggtctaccctgtatatcgccgcttctcagcctggcgatagcgccacatatctgtgtgctgtgcggcctacaagcggcggcagctacatccctacatttggcagaggcaccagcctgatcgtgcacccttatacgcgtatccagaaccctgatcctgccgtgtaccagctgcgggatagcaagagcagcgacaagagcgtgtgtctgttcaccgacttcgacagccagaccaacgtgtcccagagcaaggactccgacgtgtacatcaccgataagaccgtgctggacatgcggagcatggacttcaagagcaactccgccgtggcctggtccaacaagtccgatttcgcctgcgccaacgccttcaacaacagcattatccccgaggacacattcttcccaagccccgagagcagctgcggtacccaggctcagagcgattgcagctgtagcacagtgtctccaggcgtgctggccggaattgtgatgggcgatctggtgctgacagtgctgattgccctggccgtgtacttcctgggtagactggtgcctagaggaagaggcgctgccgaagccgccacaagaaagcagagaatcaccgagacagagagcccctaccaagagctgcaaggccagagaagcgacgtgtacagcgacctgaatacccagagggaccaaagactgcctcctgacgctcacaaacctccaggcggaggcagcttcagaacccctatccaagaggaacaggctgacgcccacagcaccctggcaaaaattcggccttactacaaataa

SEQ ID NO: 9422 - DNA, 2472 bp, Artificial Sequence
  Synthetic Polynucleotide
atggccttaccagtgaccgccttgctcctgccgctggccttgctgctccacgccgccaggccggaattcaatgctggcgtgacccagacacctaagttccaggtgctgaaaaccggccagagcatgaccctgcaatgcgcccaggacatgaaccatgagtacatgagctggtacagacaggaccccggcatgggcctgagactgatccactactctgtggctatccagaccaccgaccagggcgaagtgcccaatggctacaacgtgtccagaagcaccatcgaggacttcccactgagactgctgtctgccgctcctagccagaccagcgtgtacttttgtgccagcagctacctgggcaacaccggcgagctgttttttggcgagggcagcagactgaccgtgctcgaggacctgaagaacgtgttcccacctgaggtggccgtgttcgagcctagcgaggccgagatcagccacacccagaaagccaccctcgtgtgcctggctaccggcttctaccccgaccatgtggaactgtcttggtgggtcaacggcaaagaggtgcacagcggcgtgtctaccgacccccagccactgaaagaacagcccgccctgaacgacagccggtactgcctgagcagcagactgagagtgtccgccaccttctggcagaacccccggaaccacttcagatgccaggtgcagttctacggcctgagcgagaacgacgagtggacccaggacagagccaagcccgtgacccagatcgtgtctgccgaagcctggggcagagccgattgcggatcccaggctcagagcgattgcagctgtagcacagtgtctccaggcgtgctggccggaattgtgatgggcgatctggtgctgacagtgctgattgccctggccgtgtacttcctgggtagactggtgcctagaggaagaggcgctgccgaagccgccacaagaaagcagagaatcaccgagacagagagcccctaccaagagctgcaaggccagagaagcgacgtgtacagcgacctgaatacccagcggccttactacaaaagggccaagcgatctggatctggagcaacaaacttctcactactcaaacaagcaggtgacgtggaggagaatcccgggcctactagtatggactggatttggcgcatccttttccttgtcggcgctgctaccggcgcgcattccttcgaacaagaagtgacacagatccctgccgctctgtctgtgcctgagggcgaaaacctggtgctgaactgctccttcaccgacagcgccatctacaacctccagtggttcaggcaggaccctggaaagggactgacaagcctgctgctgatccagagcagccagagagagcagacctccggcagactgaatgccagcctggataagagcagcggcaggtctaccctgtatatcgccgcttctcagcctggcgatagcgccacatatctgtgtgctgtgcggcctacaagcggcggcagctacatccctacatttggcagaggcaccagcctgatcgtgcacccttatacgcgtatccagaaccctgatcctgccgtgtaccagctgcgggatagcaagagcagcgacaagagcgtgtgtctgttcaccgacttcgacagccagaccaacgtgtcccagagcaaggactccgacgtgtacatcaccgataagaccgtgctggacatgcggagcatggacttcaagagcaactccgccgtggcctggtccaacaagtccgatttcgcctgcgccaacgccttcaacaacagcattatccccgaggacacattcttcccaagccccgagagcagctgcggtacccaggctcagagcgattgcagctgtagcacagtgtctccaggcgtgctggccggaattgtgatgggcgatctggtgctgacagtgctgattgccctggccgtgtacttcctgggtagactggtgcctagaggaagaggcgctgccgaagccgccacaagaaagcagagaatcaccgagacagagagcccctaccaagagctgcaaggccagagaagcgacgtgtacagcgacctgaatacccagtggcggcggaagcggaaagagaagcagtctgagacaagccccaaagagttcctgaccatctacgaggacgtgaaggacctgaaaacccggcggaaccacgaacaagagcagacctttcctggcggaggcagcaccatctacagcatgatccagagccagagcagcgcccctacaagccaagagcctgcctacacactgtactccctgatccagcctagcagaaagagcggcagccggaagagaaatcacagccccagcttcaacagcacgatctacgaagtgatcggcaagagccagccaaaggctcagaaccctgccagactgagccggaaagagctggaaaacttcgacgtgtacagccggccttactacaaataa

SEQ ID NO: 9423 - DNA, 2748 bp, Artificial Sequence
  Synthetic Polynucleotide
atggccttaccagtgaccgccttgctcctgccgctggccttgctgctccacgccgccaggccggaattcaatgctggcgtgacccagacacctaagttccaggtgctgaaaaccggccagagcatgaccctgcaatgcgcccaggacatgaaccatgagtacatgagctggtacagacaggaccccggcatgggcctgagactgatccactactctgtggctatccagaccaccgaccagggcgaagtgcccaatggctacaacgtgtccagaagcaccatcgaggacttcccactgagactgctgtctgccgctcctagccagaccagcgtgtacttttgtgccagcagctacctgggcaacaccggcgagctgttttttggcgagggcagcagactgaccgtgctcgaggacctgaagaacgtgttcccacctgaggtggccgtgttcgagcctagcgaggccgagatcagccacacccagaaagccaccctcgtgtgcctggctaccggcttctaccccgaccatgtggaactgtcttggtgggtcaacggcaaagaggtgcacagcggcgtgtctaccgacccccagccactgaaagaacagcccgccctgaacgacagccggtactgcctgagcagcagactgagagtgtccgccaccttctggcagaacccccggaaccacttcagatgccaggtgcagttctacggcctgagcgagaacgacgagtggacccaggacagagccaagcccgtgacccagatcgtgtctgccgaagcctggggcagagccgattgcggatcccaggctcagagcgattgcagctgtagcacagtgtctccaggcgtgctggccggaattgtgatgggcgatctggtgctgacagtgctgattgccctggccgtgtacttcctgggtagactggtgcctagaggaagaggcgctgccgaagccgccacaagaaagcagagaatcaccgagacagagagcccctaccaagagctgcaaggccagagaagcgacgtgtacagcgacctgaatacccagagagtgaagttcagcagaagcgccgacgcccctgcctaccagcagggacagaaccaactgtacaacgagctgaacctgggcagacgggaagagtacgacgtgctggacaagcggagaggcagggaccctgagatgggcggaaagccccagcggagaaagaacccccaggaaggactgtataacgaactccagaaagacaagatggccgaagcctacagcgagatcggcatgaagggcgagcggagaagaggcaagggccacgatggcctgtaccagggcctgagcaccgccaccaaggacacctatgacgccctgcacatgcaggccctgcctccaagaagggccaagcgatctggatctggagcaacaaacttctcactactcaaacaagcaggtgacgtggaggagaatcccgggcctactagtatggactggatttggcgcatccttttccttgtcggcgctgctaccggcgcgcattccttcgaacaagaagtgacacagatccctgccgctctgtctgtgcctgagggcgaaaacctggtgctgaactgctccttcaccgacagcgccatctacaacctccagtggttcaggcaggaccctggaaagggactgacaagcctgctgctgatccagagcagccagagagagcagacctccggcagactgaatgccagcctggataagagcagcggcaggtctaccctgtatatcgccgcttctcagcctggcgatagcgccacatatctgtgtgctgtgcggcctacaagcggcggcagctacatccctacatttggcagaggcaccagcctgatcgtgcacccttatacgcgtatccagaaccctgatcctgccgtgtaccagctgcgggatagcaagagcagcgacaagagcgtgtgtctgttcaccgacttcgacagccagaccaacgtgtcccagagcaaggactccgacgtgtacatcaccgataagaccgtgctggacatgcggagcatggacttcaagagcaactccgccgtggcctggtccaacaagtccgatttcgcctgcgccaacgccttcaacaacagcattatccccgaggacacattcttcccaagccccgagagcagctgcggtaccacaacgccgggcgaaaggagttccttgccggccttttaccccggcacaagcggaagctgtagtgggtgtggaagcctcagcctcccacttcttgcgggcctcgtcgcggcagatgcagtagcttcacttcttattgtaggcgcggtatttctctgtgctcgaccaaggaggtcacccgctcaggaggatggtaaggtgtatataaatatgccaggacgcggaagctctagacgggttaagttttccagatccgcagacgcacccgcttaccaacaagggcagaaccaactctacaatgaacttaatttggggcggagggaagagtacgacgttctggacaaaaggaggggacgagatcccgagatgggcggaaagcctcagcgaaggaagaatccgcaagaggggctttataacgaactccagaaagataaaatggcagaagcctatagtgagattgggatgaagggagaaaggaggaggggtaaaggtcacgatgggttgtaccaaggattgagcacagccactaaagatacctatgatgcgctccacatgcaggccctgccgccaagataa

SEQ ID NO: 9424 - DNA, 2526 bp, Artificial Sequence
  Synthetic Polynucleotide
atggccttaccagtgaccgccttgctcctgccgctggccttgctgctccacgccgccaggccggaattcaatgctggcgtgacccagacacctaagttccaggtgctgaaaaccggccagagcatgaccctgcaatgcgcccaggacatgaaccatgagtacatgagctggtacagacaggaccccggcatgggcctgagactgatccactactctgtggctatccagaccaccgaccagggcgaagtgcccaatggctacaacgtgtccagaagcaccatcgaggacttcccactgagactgctgtctgccgctcctagccagaccagcgtgtacttttgtgccagcagctacctgggcaacaccggcgagctgttttttggcgagggcagcagactgaccgtgctcgaggacctgaagaacgtgttcccacctgaggtggccgtgttcgagcctagcgaggccgagatcagccacacccagaaagccaccctcgtgtgcctggctaccggcttctaccccgaccatgtggaactgtcttggtgggtcaacggcaaagaggtgcacagcggcgtgtctaccgacccccagccactgaaagaacagcccgccctgaacgacagccggtactgcctgagcagcagactgagagtgtccgccaccttctggcagaacccccggaaccacttcagatgccaggtgcagttctacggcctgagcgagaacgacgagtggacccaggacagagccaagcccgtgacccagatcgtgtctgccgaagcctggggcagagccgattgcggatcccaggctcagagcgattgcagctgtagcacagtgtctccaggcgtgctggccggaattgtgatgggcgatctggtgctgacagtgctgattgccctggccgtgtacttcctgggtagactggtgcctagaggaagaggcgctgccgaagccgccacaagaaagcagagaatcaccgagacagagagcccctaccaagagctgcaaggccagagaagcgacgtgtacagcgacctgaatacccagagagtgaagttcagcagaagcgccgacgcccctgcctaccagcagggacagaaccaactgtacaacgagctgaacctgggcagacgggaagagtacgacgtgctggacaagcggagaggcagggaccctgagatgggcggaaagccccagcggagaaagaacccccaggaaggactgtataacgaactccagaaagacaagatggccgaagcctacagcgagatcggcatgaagggcgagcggagaagaggcaagggccacgatggcctgtaccagggcctgagcaccgccaccaaggacacctatgacgccctgcacatgcaggccctgcctccaagaagggccaagcgatctggatctggagcaacaaacttctcactactcaaacaagcaggtgacgtggaggagaatcccgggcctactagtatggactggatttggcgcatccttttccttgtcggcgctgctaccggcgcgcattccttcgaacaagaagtgacacagatccctgccgctctgtctgtgcctgagggcgaaaacctggtgctgaactgctccttcaccgacagcgccatctacaacctccagtggttcaggcaggaccctggaaagggactgacaagcctgctgctgatccagagcagccagagagagcagacctccggcagactgaatgccagcctggataagagcagcggcaggtctaccctgtatatcgccgcttctcagcctggcgatagcgccacatatctgtgtgctgtgcggcctacaagcggcggcagctacatccctacatttggcagaggcaccagcctgatcgtgcacccttatacgcgtatccagaaccctgatcctgccgtgtaccagctgcgggatagcaagagcagcgacaagagcgtgtgtctgttcaccgacttcgacagccagaccaacgtgtcccagagcaaggactccgacgtgtacatcaccgataagaccgtgctggacatgcggagcatggacttcaagagcaactccgccgtggcctggtccaacaagtccgatttcgcctgcgccaacgccttcaacaacagcattatccccgaggacacattcttcccaagccccgagagcagctgcggtaccacaacgccgggcgaaaggagttccttgccggccttttaccccggcacaagcggaagctgtagtgggtgtggaagcctcagcctcccacttcttgcgggcctcgtcgcggcagatgcagtagcttcacttcttattgtaggcgcggtatttaagagaggccggaagaagctgctgtacatcttcaagcagcctttcatgcggcccgtgcagaccacccaggaagaggacggctgctcctgccggttccccgaggaagaagaaggcggctgcgagctgctctgtgctcgaccaaggaggtcacccgctcaggaggatggtaaggtgtatataaatatgccaggacgcggataa

SEQ ID NO: 9425 - DNA, 2523 bp, Artificial Sequence
  Synthetic Polynucleotide
atggccttaccagtgaccgccttgctcctgccgctggccttgctgctccacgccgccaggccggaattcaatgctggcgtgacccagacacctaagttccaggtgctgaaaaccggccagagcatgaccctgcaatgcgcccaggacatgaaccatgagtacatgagctggtacagacaggaccccggcatgggcctgagactgatccactactctgtggctatccagaccaccgaccagggcgaagtgcccaatggctacaacgtgtccagaagcaccatcgaggacttcccactgagactgctgtctgccgctcctagccagaccagcgtgtacttttgtgccagcagctacctgggcaacaccggcgagctgttttttggcgagggcagcagactgaccgtgctcgaggacctgaagaacgtgttcccacctgaggtggccgtgttcgagcctagcgaggccgagatcagccacacccagaaagccaccctcgtgtgcctggctaccggcttctaccccgaccatgtggaactgtcttggtgggtcaacggcaaagaggtgcacagcggcgtgtctaccgacccccagccactgaaagaacagcccgccctgaacgacagccggtactgcctgagcagcagactgagagtgtccgccaccttctggcagaacccccggaaccacttcagatgccaggtgcagttctacggcctgagcgagaacgacgagtggacccaggacagagccaagcccgtgacccagatcgtgtctgccgaagcctggggcagagccgattgcggatcccaggctcagagcgattgcagctgtagcacagtgtctccaggcgtgctggccggaattgtgatgggcgatctggtgctgacagtgctgattgccctggccgtgtacttcctgggtagactggtgcctagaggaagaggcgctgccgaagccgccacaagaaagcagagaatcaccgagacagagagcccctaccaagagctgcaaggccagagaagcgacgtgtacagcgacctgaatacccagagagtgaagttcagcagaagcgccgacgcccctgcctaccagcagggacagaaccaactgtacaacgagctgaacctgggcagacgggaagagtacgacgtgctggacaagcggagaggcagggaccctgagatgggcggaaagccccagcggagaaagaacccccaggaaggactgtataacgaactccagaaagacaagatggccgaagcctacagcgagatcggcatgaagggcgagcggagaagaggcaagggccacgatggcctgtaccagggcctgagcaccgccaccaaggacacctatgacgccctgcacatgcaggccctgcctccaagaagggccaagcgatctggatctggagcaacaaacttctcactactcaaacaagcaggtgacgtggaggagaatcccgggcctactagtatggactggatttggcgcatccttttccttgtcggcgctgctaccggcgcgcattccttcgaacaagaagtgacacagatccctgccgctctgtctgtgcctgagggcgaaaacctggtgctgaactgctccttcaccgacagcgccatctacaacctccagtggttcaggcaggaccctggaaagggactgacaagcctgctgctgatccagagcagccagagagagcagacctccggcagactgaatgccagcctggataagagcagcggcaggtctaccctgtatatcgccgcttctcagcctggcgatagcgccacatatctgtgtgctgtgcggcctacaagcggcggcagctacatccctacatttggcagaggcaccagcctgatcgtgcacccttatacgcgtatccagaaccctgatcctgccgtgtaccagctgcgggatagcaagagcagcgacaagagcgtgtgtctgttcaccgacttcgacagccagaccaacgtgtcccagagcaaggactccgacgtgtacatcaccgataagaccgtgctggacatgcggagcatggacttcaagagcaactccgccgtggcctggtccaacaagtccgatttcgcctgcgccaacgccttcaacaacagcattatccccgaggacacattcttcccaagccccgagagcagctgcggtaccacaacgccgggcgaaaggagttccttgccggccttttaccccggcacaagcggaagctgtagtgggtgtggaagcctcagcctcccacttcttgcgggcctcgtcgcggcagatgcagtagcttcacttcttattgtaggcgcggtatttaggagcaagcggtcacggctgctccacagcgattacatgaatatgacaccacgaagaccgggtcctactcgcaaacactaccaaccctacgcacctccccgcgactttgcagcgtaccgatctctctgtgctcgaccaaggaggtcacccgctcaggaggatggtaaggtgtatataaatatgccaggacgcggataa

SEQ ID NO: 9426 - DNA, 3153 bp, Artificial Sequence
  Synthetic Polynucleotide
atggccttaccagtgaccgccttgctcctgccgctggccttgctgctccacgccgccaggccggaattcaatgctggcgtgacccagacacctaagttccaggtgctgaaaaccggccagagcatgaccctgcaatgcgcccaggacatgaaccatgagtacatgagctggtacagacaggaccccggcatgggcctgagactgatccactactctgtggctatccagaccaccgaccagggcgaagtgcccaatggctacaacgtgtccagaagcaccatcgaggacttcccactgagactgctgtctgccgctcctagccagaccagcgtgtacttttgtgccagcagctacctgggcaacaccggcgagctgttttttggcgagggcagcagactgaccgtgctcgaggacctgaagaacgtgttcccacctgaggtggccgtgttcgagcctagcgaggccgagatcagccacacccagaaagccaccctcgtgtgcctggctaccggcttctaccccgaccatgtggaactgtcttggtgggtcaacggcaaagaggtgcacagcggcgtgtctaccgacccccagccactgaaagaacagcccgccctgaacgacagccggtactgcctgagcagcagactgagagtgtccgccaccttctggcagaacccccggaaccacttcagatgccaggtgcagttctacggcctgagcgagaacgacgagtggacccaggacagagccaagcccgtgacccagatcgtgtctgccgaagcctggggcagagccgattgcggatcccagagcttcggcctgctggaccccaagctgtgctacctgctggatggcatcctgttcatctacggcgtgatcctgaccgccctgttcctgagagtgaagttcagcagaagcgccgacgcccctgcctaccagcagggacagaaccaactgtacaacgagctgaacctgggcagacgggaagagtacgacgtgctggacaagcggagaggcagggaccctgagatgggcggaaagccccagcggagaaagaacccccaggaaggactgtataacgaactccagaaagacaagatggccgaagcctacagcgagatcggcatgaagggcgagcggagaagaggcaagggccacgatggcctgtaccagggcctgagcaccgccaccaaggacacctatgacgccctgcacatgcaggccctgcctccaagaagggccaagcgatctggatctggagcaacaaacttctcactactcaaacaagcaggtgacgtggaggagaatcccgggcctactagtatggactggatttggcgcatccttttccttgtcggcgctgctaccggcgcgcattccttcgaacaagaagtgacacagatccctgccgctctgtctgtgcctgagggcgaaaacctggtgctgaactgctccttcaccgacagcgccatctacaacctccagtggttcaggcaggaccctggaaagggactgacaagcctgctgctgatccagagcagccagagagagcagacctccggcagactgaatgccagcctggataagagcagcggcaggtctaccctgtatatcgccgcttctcagcctggcgatagcgccacatatctgtgtgctgtgcggcctacaagcggcggcagctacatccctacatttggcagaggcaccagcctgatcgtgcacccttatacgcgtatccagaaccctgatcctgccgtgtaccagctgcgggatagcaagagcagcgacaagagcgtgtgtctgttcaccgacttcgacagccagaccaacgtgtcccagagcaaggactccgacgtgtacatcaccgataagaccgtgctggacatgcggagcatggacttcaagagcaactccgccgtggcctggtccaacaagtccgatttcgcctgcgccaacgccttcaacaacagcattatccccgaggacacattcttcccaagccccgagagcagctgcggtacccagagttttgggttgttggaccctaaattgtgctatctgttggacggaatcctgttcatttacggagtgatcctgaccgcattgttcctgcgggttaagttttccagatccgcagacgcacccgcttaccaacaagggcagaaccaactctacaatgaacttaatttggggcggagggaagagtacgacgttctggacaaaaggaggggacgagatcccgagatgggcggaaagcctcagcgaaggaagaatccgcaagaggggctttataacgaactccagaaagataaaatggcagaagcctatagtgagattgggatgaagggagaaaggaggaggggtaaaggtcacgatgggttgtaccaaggattgagcacagccactaaagatacctatgatgcgctccacatgcaggccctgccgccaagacgcgccaagagaagcggatctggcgtgaagcagaccctgaatttcgacctgctgaagctggctggcgacgtggaatccaacccaggcccttctagaggccatatgaccgagtacaagcccacggtgcgcctcgccacccgcgacgacgtccccagggccgtacgcaccctcgccgccgcgttcgccgactaccccgccacgcgccacaccgtcgatccggaccgccacatcgagcgggtcaccgagctgcaagaactcttcctcacgcgcgtcgggctcgacatcggcaaggtgtgggtcgcggacgacggcgccgcggtggcggtctggaccacgccggagagcgtcgaagcgggggcggtgttcgccgagatcggcccgcgcatggccgagttgagcggttcccggctggccgcgcagcaacagatggaaggcctcctggcgccgcaccggcccaaggagcccgcgtggttcctggccaccgtcggcgtctcgcccgaccaccagggcaagggtctgggcagcgccgtcgtgctccccggagtggaggcggccgagcgcgccggggtgcccgccttcctggagacctccgcgccccgcaacctccccttctacgagcggctcggcttcaccgtcaccgccgacgtcgaggtgcccgaaggaccgcgcacctggtgcatgacccgcaagcccggtgcctga

SEQ ID NO: 9427 - DNA, 2481 bp, Artificial Sequence
  Synthetic Polynucleotide
atggccttaccagtgaccgccttgctcctgccgctggccttgctgctccacgccgccaggccggaattcaatgctggcgtgacccagacacctaagttccaggtgctgaaaaccggccagagcatgaccctgcaatgcgcccaggacatgaaccatgagtacatgagctggtacagacaggaccccggcatgggcctgagactgatccactactctgtggctatccagaccaccgaccagggcgaagtgcccaatggctacaacgtgtccagaagcaccatcgaggacttcccactgagactgctgtctgccgctcctagccagaccagcgtgtacttttgtgccagcagctacctgggcaacaccggcgagctgttttttggcgagggcagcagactgaccgtgctcgaggacctgaagaacgtgttcccacctgaggtggccgtgttcgagcctagcgaggccgagatcagccacacccagaaagccaccctcgtgtgcctggctaccggcttctaccccgaccatgtggaactgtcttggtgggtcaacggcaaagaggtgcacagcggcgtgtctaccgacccccagccactgaaagaacagcccgccctgaacgacagccggtactgcctgagcagcagactgagagtgtccgccaccttctggcagaacccccggaaccacttcagatgccaggtgcagttctacggcctgagcgagaacgacgagtggacccaggacagagccaagcccgtgacccagatcgtgtctgccgaagcctggggcagagccgattgcggatcccagagcttcggcctgctggaccccaagctgtgctacctgctggatggcatcctgttcatctacggcgtgatcctgaccgccctgttcctgagagtgaagttcagcagaagcgccgacgcccctgcctaccagcagggacagaaccaactgtacaacgagctgaacctgggcagacgggaagagtacgacgtgctggacaagcggagaggcagggaccctgagatgggcggaaagccccagcggagaaagaacccccaggaaggactgtataacgaactccagaaagacaagatggccgaagcctacagcgagatcggcatgaagggcgagcggagaagaggcaagggccacgatggcctgtaccagggcctgagcaccgccaccaaggacacctatgacgccctgcacatgcaggccctgcctccaagaagggccaagcgatctggatctggagcaacaaacttctcactactcaaacaagcaggtgacgtggaggagaatcccgggcctactagtatggactggatttggcgcatccttttccttgtcggcgctgctaccggcgcgcattccttcgaacaagaagtgacacagatccctgccgctctgtctgtgcctgagggcgaaaacctggtgctgaactgctccttcaccgacagcgccatctacaacctccagtggttcaggcaggaccctggaaagggactgacaagcctgctgctgatccagagcagccagagagagcagacctccggcagactgaatgccagcctggataagagcagcggcaggtctaccctgtatatcgccgcttctcagcctggcgatagcgccacatatctgtgtgctgtgcggcctacaagcggcggcagctacatccctacatttggcagaggcaccagcctgatcgtgcacccttatacgcgtgcctctacaaagggaccctccgtgtttcctctggctcccagcagcaagtctacaagcggaggaacagccgctctgggctgcctggtcaaggattactttcccgagcctgtgaccgtgtcctggaatagcggagcactgacaagcggcgtgcacacctttccagccgtgctgcaaagcagcggcctgtactctctgagcagcgtggtcacagtgcctagctctagcctgggcacccagacctacatctgcaatgtgaaccacaagcctagcaacaccaaggtggacaagagagtggaacccaagagctgtggtacccagagttttgggttgttggaccctaaattgagctatctgttggacggaatcctgttcatttacggagtgatcctgaccgcattgttcctgcgggttaagttttccagatccgcagacgcacccgcttaccaacaagggcagaaccaactctacaatgaacttaatttggggcggagggaagagtacgacgttctggacaaaaggaggggacgagatcccgagatgggcggaaagcctcagcgaaggaagaatccgcaagaggggctttataacgaactccagaaagataaaatggcagaagcctatagtgagattgggatgaagggagaaaggaggaggggtaaaggtcacgatgggttgtaccaaggattgagcacagccactaaagatacctatgatgcgctccacatgcaggccctgccgccaagataa

SEQ ID NO: 9428 - DNA, 2481 bp, Artificial Sequence; identical to SEQ ID NO: 9427
  Synthetic Polynucleotide

SEQ ID NO: 9429 - DNA, 2481 bp, Artificial Sequence; identical to SEQ ID NO: 9427
  Synthetic Polynucleotide

SEQ ID NO: 9430 - DNA, 2454 bp, Artificial Sequence
  Synthetic Polynucleotide
atggccttaccagtgaccgccttgctcctgccgctggccttgctgctccacgccgccaggccggaattcaatgctggcgtgacccagacacctaagttccaggtgctgaaaaccggccagagcatgaccctgcaatgcgcccaggacatgaaccatgagtacatgagctggtacagacaggaccccggcatgggcctgagactgatccactactctgtggctatccagaccaccgaccagggcgaagtgcccaatggctacaacgtgtccagaagcaccatcgaggacttcccactgagactgctgtctgccgctcctagccagaccagcgtgtacttttgtgccagcagctacctgggcaacaccggcgagctgttttttggcgagggcagcagactgaccgtgctcgaggacctgaagaacgtgttcccacctgaggtggccgtgttcgagcctagcgaggccgagatcagccacacccagaaagccaccctcgtgtgcctggctaccggcttctaccccgaccatgtggaactgtcttggtgggtcaacggcaaagaggtgcacagcggcgtgtctaccgacccccagccactgaaagaacagcccgccctgaacgacagccggtactgcctgagcagcagactgagagtgtccgccaccttctggcagaacccccggaaccacttcagatgccaggtgcagttctacggcctgagcgagaacgacgagtggacccaggacagagccaagcccgtgacccagatcgtgtctgccgaagcctggggcagagccgattgcggatcccagagcttcggcctgctggaccccaagctgtgctacctgctggatggcatcctgttcatctacggcgtgatcctgaccgccctgttcctgagagtgaagttcagcagaagcgccgacgcccctgcctaccagcagggacagaaccaactgtacaacgagctgaacctgggcagacgggaagagtacgacgtgctggacaagcggagaggcagggaccctgagatgggcggaaagccccagcggagaaagaacccccaggaaggactgtataacgaactccagaaagacaagatggccgaagcctacagcgagatcggcatgaagggcgagcggagaagaggcaagggccacgatggcctgtaccagggcctgagcaccgccaccaaggacacctatgacgccctgcacatgcaggccctgcctccaagaagggccaagcgatctggatctggagcaacaaacttctcactactcaaacaagcaggtgacgtggaggagaatcccgggcctactagtatggactggatttggcgcatccttttccttgtcggcgctgctaccggcgcgcattccttcgaacaagaagtgacacagatccctgccgctctgtctgtgcctgagggcgaaaacctggtgctgaactgctccttcaccgacagcgccatctacaacctccagtggttcaggcaggaccctggaaagggactgacaagcctgctgctgatccagagcagccagagagagcagacctccggcagactgaatgccagcctggataagagcagcggcaggtctaccctgtatatcgccgcttctcagcctggcgatagcgccacatatctgtgtgctgtgcggcctacaagcggcggcagctacatccctacatttggcagaggcaccagcctgatcgtgcacccttatacgcgtatccagaaccctgatcctgccgtgtaccagctgcgggatagcaagagcagcgacaagagcgtgtgtctgttcaccgacttcgacagccagaccaacgtgtcccagagcaaggactccgacgtgtacatcaccgataagaccgtgctggacatgcggagcatggacttcaagagcaactccgccgtggcctggtccaacaagtccgatttcgcctgcgccaacgccttcaacaacagcattatccccgaggacacattcttcccaagccccgagagcagctgcggtacccagagttttgggttgttggaccctaaattgagctatctgttggacggaatcctgttcatttacggagtgatcctgaccgcattgttcctgcgggttaagttttccagatccgcagacgcacccgcttaccaacaagggcagaaccaactctacaatgaacttaatttggggcggagggaagagtacgacgttctggacaaaaggaggggacgagatcccgagatgggcggaaagcctcagcgaaggaagaatccgcaagaggggctttataacgaactccagaaagataaaatggcagaagcctatagtgagattgggatgaagggagaaaggaggaggggtaaaggtcacgatgggttgtaccaaggattgagcacagccactaaagatacctatgatgcgctccacatgcaggccctgccgccaagataa

SEQ ID NO: 9431 - DNA, 2856 bp, Artificial Sequence
  Synthetic Polynucleotide
atggccttaccagtgaccgccttgctcctgccgctggccttgctgctccacgccgccaggccggaattcaatgctggcgtgacccagacacctaagttccaggtgctgaaaaccggccagagcatgaccctgcaatgcgcccaggacatgaaccatgagtacatgagctggtacagacaggaccccggcatgggcctgagactgatccactactctgtggctatccagaccaccgaccagggcgaagtgcccaatggctacaacgtgtccagaagcaccatcgaggacttcccactgagactgctgtctgccgctcctagccagaccagcgtgtacttttgtgccagcagctacctgggcaacaccggcgagctgttttttggcgagggcagcagactgaccgtgctcgagggacagcctaaggccaatcctaccgtgacactgttccctccaagcagcgaagaactccaggccaacaaggccacacttgtgtgcctgatctccgacttctaccctggggctgtgacagtggcttggaaggccgatggatctcctgtgaaagccggcgtggaaaccaccaagccatccaagcagagcaacaacaaatacgccgccagctcctacctgagcctgacacctgagcagtggaagtcccacagatcctacagctgccaagtgacccacgaaggcagcaccgtggaaaagacagtggcccctacagagtgcagcggatccctgggagagcctcagctgtgctatatcctggacgccatcctgtttctgtacggcatcgtgctgaccctgctgtactgccggctgaagatccaagtgcggaaggccgccatcaccagctacgagaaatccgacggcgtgtacaccggcctgagcaccagaaatcaagagacatacgagacactgaagcacgaaaagcctccacaaagggccaagcgatctggatctggagcaacaaacttctcactactcaaacaagcaggtgacgtggaggagaatcccgggcctactagtatggactggatttggcgcatccttttccttgtcggcgctgctaccggcgcgcattccttcgaacaagaagtgacacagatccctgccgctctgtctgtgcctgagggcgaaaacctggtgctgaactgctccttcaccgacagcgccatctacaacctccagtggttcaggcaggaccctggaaagggactgacaagcctgctgctgatccagagcagccagagagagcagacctccggcagactgaatgccagcctggataagagcagcggcaggtctaccctgtatatcgccgcttctcagcctggcgatagcgccacatatctgtgtgctgtgcggcctacaagcggcggcagctacatccctacatttggcagaggcaccagcctgatcgtgcacccttatacgcgtatccagaaccctgatcctgccgtgtaccagctgcgggatagcaagagcagcgacaagagcgtgtgtctgttcaccgacttcgacagccagaccaacgtgtcccagagcaaggactccgacgtgtacatcaccgataagaccgtgctggacatgcggagcatggacttcaagagcaactccgccgtggcctggtccaacaagtccgatttcgcctgcgccaacgccttcaacaacagcattatccccgaggacacattcttcccaagccccgagagcagctgcggtacccagagttttgggttgttggaccctaaattgtgctatctgttggacggaatcctgttcatttacggagtgatcctgaccgcattgttcctgcgggttaagttttccagatccgcagacgcacccgcttaccaacaagggcagaaccaactctacaatgaacttaatttggggcggagggaagagtacgacgttctggacaaaaggaggggacgagatcccgagatgggcggaaagcctcagcgaaggaagaatccgcaagaggggctttataacgaactccagaaagataaaatggcagaagcctatagtgagattgggatgaagggagaaaggaggaggggtaaaggtcacgatgggttgtaccaaggattgagcacagccactaaagatacctatgatgcgctccacatgcaggccctgccgccaagacgcgccaagagaagcggatctggcgtgaagcagaccctgaatttcgacctgctgaagctggctggcgacgtggaatccaacccaggcccttctagaggccatatgaccgagtacaagcccacggtgcgcctcgccacccgcgacgacgtccccagggccgtacgcaccctcgccgccgcgttcgccgactaccccgccacgcgccacaccgtcgatccggaccgccacatcgagcgggtcaccgagctgcaagaactcttcctcacgcgcgtcgggctcgacatcggcaaggtgtgggtcgcggacgacggcgccgcggtggcggtctggaccacgccggagagcgtcgaagcgggggcggtgttcgccgagatcggcccgcgcatggccgagttgagcggttcccggctggccgcgcagcaacagatggaaggcctcctggcgccgcaccggcccaaggagcccgcgtggttcctggccaccgtcggcgtctcgcccgaccaccagggcaagggtctgggcagcgccgtcgtgctccccggagtggaggcggccgagcgcgccggggtgcccgccttcctggagacctccgcgccccgcaacctccccttctacgagcggctcggcttcaccgtcaccgccgacgtcgaggtgcccgaaggaccgcgcacctggtgcatgacccgcaagcccggtgcctga

SEQ ID NO: 9432 - DNA, 2256 bp, Artificial Sequence
  Synthetic Polynucleotide
atggccttaccagtgaccgccttgctcctgccgctggccttgctgctccacgccgccaggccggaattcaatgctggcgtgacccagacacctaagttccaggtgctgaaaaccggccagagcatgaccctgcaatgcgcccaggacatgaaccatgagtacatgagctggtacagacaggaccccggcatgggcctgagactgatccactactctgtggctatccagaccaccgaccagggcgaagtgcccaatggctacaacgtgtccagaagcaccatcgaggacttcccactgagactgctgtctgccgctcctagccagaccagcgtgtacttttgtgccagcagctacctgggcaacaccggcgagctgttttttggcgagggcagcagactgaccgtgctcgaggacctgaagaacgtgttcccacctgaggtggccgtgttcgagcctagcgaggccgagatcagccacacccagaaagccaccctcgtgtgcctggctaccggcttctaccccgaccatgtggaactgtcttggtgggtcaacggcaaagaggtgcacagcggcgtgtctaccgacccccagccactgaaagaacagcccgccctgaacgacagccggtactgcctgagcagcagactgagagtgtccgccaccttctggcagaacccccggaaccacttcagatgccaggtgcagttctacggcctgagcgagaacgacgagtggacccaggacagagccaagcccgtgacccagatcgtgtctgccgaagcctggggcagagccgattgcggatcccagagcttcggcctgctggaccccaagctgtgctacctgctggatggcatcctgttcatctacggcgtgatcctgaccgccctgttcctgagagtgaagttcagcagaagcgccgacgcccctgcctaccagcagggacagaaccaactgtacaacgagctgaacctgggcagacgggaagagtacgacgtgctggacaagcggagaggcagggaccctgagatgggcggaaagccccagcggagaaagaacccccaggaaggactgtataacgaactccagaaagacaagatggccgaagcctacagcgagatcggcatgaagggcgagcggagaagaggcaagggccacgatggcctgtaccagggcctgagcaccgccaccaaggacacctatgacgccctgcacatgcaggccctgcctccaagaagggccaagcgatctggatctggagcaacaaacttctcactactcaaacaagcaggtgacgtggaggagaatcccgggcctactagtatggactggatttggcgcatccttttccttgtcggcgctgctaccggcgcgcattccttcgaacaagaagtgacacagatccctgccgctctgtctgtgcctgagggcgaaaacctggtgctgaactgctccttcaccgacagcgccatctacaacctccagtggttcaggcaggaccctggaaagggactgacaagcctgctgctgatccagagcagccagagagagcagacctccggcagactgaatgccagcctggataagagcagcggcaggtctaccctgtatatcgccgcttctcagcctggcgatagcgccacatatctgtgtgctgtgcggcctacaagcggcggcagctacatccctacatttggcagaggcaccagcctgatcgtgcacccttatacgcgtgcctctacaaagggaccctccgtgtttcctctggctcccagcagcaagtctacaagcggaggaacagccgctctgggctgcctggtcaaggattactttcccgagcctgtgaccgtgtcctggaatagcggagcactgacaagcggcgtgcacacctttccagccgtgctgcaaagcagcggcctgtactctctgagcagcgtggtcacagtgcctagctctagcctgggcacccagacctacatctgcaatgtgaaccacaagcctagcaacaccaaggtggacaagagagtggaacccaagagctgtggtaccctcggagaaccacagctctgttacattctggatgctatcctgttcctctatgggatcgtcctgacactcctgtattgcagactcaaaattcaagttcgcaaagccgccattacctcttacgagaagagtgatggggtgtacacaggactgtctacccggaatcaagaaacctacgaaaccctcaaacatgagaagccacctcagtaa

SEQ ID NO: 9433 - DNA, 2256 bp, Artificial Sequence; identical to SEQ ID NO: 9432
  Synthetic Polynucleotide

SEQ ID NO: 9434 - DNA, 2229 bp, Artificial Sequence
  Synthetic Polynucleotide
atggccttaccagtgaccgccttgctcctgccgctggccttgctgctccacgccgccaggccggaattcaatgctggcgtgacccagacacctaagttccaggtgctgaaaaccggccagagcatgaccctgcaatgcgcccaggacatgaaccatgagtacatgagctggtacagacaggaccccggcatgggcctgagactgatccactactctgtggctatccagaccaccgaccagggcgaagtgcccaatggctacaacgtgtccagaagcaccatcgaggacttcccactgagactgctgtctgccgctcctagccagaccagcgtgtacttttgtgccagcagctacctgggcaacaccggcgagctgttttttggcgagggcagcagactgaccgtgctcgaggacctgaagaacgtgttcccacctgaggtggccgtgttcgagcctagcgaggccgagatcagccacacccagaaagccaccctcgtgtgcctggctaccggcttctaccccgaccatgtggaactgtcttggtgggtcaacggcaaagaggtgcacagcggcgtgtctaccgacccccagccactgaaagaacagcccgccctgaacgacagccggtactgcctgagcagcagactgagagtgtccgccaccttctggcagaacccccggaaccacttcagatgccaggtgcagttctacggcctgagcgagaacgacgagtggacccaggacagagccaagcccgtgacccagatcgtgtctgccgaagcctggggcagagccgattgcggatcccagagcttcggcctgctggaccccaagctgtgctacctgctggatggcatcctgttcatctacggcgtgatcctgaccgccctgttcctgagagtgaagttcagcagaagcgccgacgcccctgcctaccagcagggacagaaccaactgtacaacgagctgaacctgggcagacgggaagagtacgacgtgctggacaagcggagaggcagggaccctgagatgggcggaaagccccagcggagaaagaacccccaggaaggactgtataacgaactccagaaagacaagatggccgaagcctacagcgagatcggcatgaagggcgagcggagaagaggcaagggccacgatggcctgtaccagggcctgagcaccgccaccaaggacacctatgacgccctgcacatgcaggccctgcctccaagaagggccaagcgatctggatctggagcaacaaacttctcactactcaaacaagcaggtgacgtggaggagaatcccgggcctactagtatggactggatttggcgcatccttttccttgtcggcgctgctaccggcgcgcattccttcgaacaagaagtgacacagatccctgccgctctgtctgtgcctgagggcgaaaacctggtgctgaactgctccttcaccgacagcgccatctacaacctccagtggttcaggcaggaccctggaaagggactgacaagcctgctgctgatccagagcagccagagagagcagacctccggcagactgaatgccagcctggataagagcagcggcaggtctaccctgtatatcgccgcttctcagcctggcgatagcgccacatatctgtgtgctgtgcggcctacaagcggcggcagctacatccctacatttggcagaggcaccagcctgatcgtgcacccttatacgcgtatccagaaccctgatcctgccgtgtaccagctgcgggatagcaagagcagcgacaagagcgtgtgtctgttcaccgacttcgacagccagaccaacgtgtcccagagcaaggactccgacgtgtacatcaccgataagaccgtgctggacatgcggagcatggacttcaagagcaactccgccgtggcctggtccaacaagtccgatttcgcctgcgccaacgccttcaacaacagcattatccccgaggacacattcttcccaagccccgagagcagctgcggtaccctcggagaaccacagctctgttacattctggatgctatcctgttcctctatgggatcgtcctgacactcctgtattgcagactcaaaattcaagttcgcaaagccgccattacctcttacgagaagagtgatggggtgtacacaggactgtctacccggaatcaagaaacctacgaaaccctcaaacatgagaagccacctcagtaa

SEQ ID NO: 9435 - DNA, 2868 bp, Artificial Sequence
  Synthetic Polynucleotide
atggccttaccagtgaccgccttgctcctgccgctggccttgctgctccacgccgccaggccggaattcaatgctggcgtgacccagacacctaagttccaggtgctgaaaaccggccagagcatgaccctgcaatgcgcccaggacatgaaccatgagtacatgagctggtacagacaggaccccggcatgggcctgagactgatccactactctgtggctatccagaccaccgaccagggcgaagtgcccaatggctacaacgtgtccagaagcaccatcgaggacttcccactgagactgctgtctgccgctcctagccagaccagcgtgtacttttgtgccagcagctacctgggcaacaccggcgagctgttttttggcgagggcagcagactgaccgtgctcgagggacagcctaaggccaatcctaccgtgacactgttccctccaagcagcgaagaactccaggccaacaaggccacacttgtgtgcctgatctccgacttctaccctggggctgtgacagtggcttggaaggccgatggatctcctgtgaaagccggcgtggaaaccaccaagccatccaagcagagcaacaacaaatacgccgccagctcctacctgagcctgacacctgagcagtggaagtcccacagatcctacagctgccaagtgacccacgaaggcagcaccgtggaaaagacagtggcccctacagagtgcagcacaacacctggcgagagaagtagcctgcctgccttctatcctggcaccagcggctcttgttctggctgtggatctctgagcctgcctctgctggctggactggttgctgctgatgctgtggcctctctgctgattgtgggagccgtgttcctgtgcgccagacctagaagaagccccgctcaagaggacggcaaggtgtacatcaacatgcccggcagaggaagggccaagcgatctggatctggagcaacaaacttctcactactcaaacaagcaggtgacgtggaggagaatcccgggcctactagtatggactggatttggcgcatccttttccttgtcggcgctgctaccggcgcgcattccttcgaacaagaagtgacacagatccctgccgctctgtctgtgcctgagggcgaaaacctggtgctgaactgctccttcaccgacagcgccatctacaacctccagtggttcaggcaggaccctggaaagggactgacaagcctgctgctgatccagagcagccagagagagcagacctccggcagactgaatgccagcctggataagagcagcggcaggtctaccctgtatatcgccgcttctcagcctggcgatagcgccacatatctgtgtgctgtgcggcctacaagcggcggcagctacatccctacatttggcagaggcaccagcctgatcgtgcacccttatacgcgtatccagaaccctgatcctgccgtgtaccagctgcgggatagcaagagcagcgacaagagcgtgtgtctgttcaccgacttcgacagccagaccaacgtgtcccagagcaaggactccgacgtgtacatcaccgataagaccgtgctggacatgcggagcatggacttcaagagcaactccgccgtggcctggtccaacaagtccgatttcgcctgcgccaacgccttcaacaacagcattatccccgaggacacattcttcccaagccccgagagcagctgcggtacccagagttttgggttgttggaccctaaattgtgctatctgttggacggaatcctgttcatttacggagtgatcctgaccgcattgttcctgcgggttaagttttccagatccgcagacgcacccgcttaccaacaagggcagaaccaactctacaatgaacttaatttggggcggagggaagagtacgacgttctggacaaaaggaggggacgagatcccgagatgggcggaaagcctcagcgaaggaagaatccgcaagaggggctttataacgaactccagaaagataaaatggcagaagcctatagtgagattgggatgaagggagaaaggaggaggggtaaaggtcacgatgggttgtaccaaggattgagcacagccactaaagatacctatgatgcgctccacatgcaggccctgccgccaagacgcgccaagagaagcggatctggcgtgaagcagaccctgaatttcgacctgctgaagctggctggcgacgtggaatccaacccaggcccttctagaggccatatgaccgagtacaagcccacggtgcgcctcgccacccgcgacgacgtccccagggccgtacgcaccctcgccgccgcgttcgccgactaccccgccacgcgccacaccgtcgatccggaccgccacatcgagcgggtcaccgagctgcaagaactcttcctcacgcgcgtcgggctcgacatcggcaaggtgtgggtcgcggacgacggcgccgcggtggcggtctggaccacgccggagagcgtcgaagcgggggcggtgttcgccgagatcggcccgcgcatggccgagttgagcggttcccggctggccgcgcagcaacagatggaaggcctcctggcgccgcaccggcccaaggagcccgcgtggttcctggccaccgtcggcgtctcgcccgaccaccagggcaagggtctgggcagcgccgtcgtgctccccggagtggaggcggccgagcgcgccggggtgcccgccttcctggagacctccgcgccccgcaacctccccttctacgagcggctcggcttcaccgtcaccgccgacgtcgaggtgcccgaaggaccgcgcacctggtgcatgacccgcaagcccggtgcctga

SEQ ID NO: 9436 - DNA, 2967 bp, Artificial Sequence
  Synthetic Polynucleotide
atggccttaccagtgaccgccttgctcctgccgctggccttgctgctccacgccgccaggccggaattcaatgctggcgtgacccagacacctaagttccaggtgctgaaaaccggccagagcatgaccctgcaatgcgcccaggacatgaaccatgagtacatgagctggtacagacaggaccccggcatgggcctgagactgatccactactctgtggctatccagaccaccgaccagggcgaagtgcccaatggctacaacgtgtccagaagcaccatcgaggacttcccactgagactgctgtctgccgctcctagccagaccagcgtgtacttttgtgccagcagctacctgggcaacaccggcgagctgttttttggcgagggcagcagactgaccgtgctcgaggacctgaagaacgtgttcccacctgaggtggccgtgttcgagcctagcgaggccgagatcagccacacccagaaagccaccctcgtgtgcctggctaccggcttctaccccgaccatgtggaactgtcttggtgggtcaacggcaaagaggtgcacagcggcgtgtctaccgacccccagccactgaaagaacagcccgccctgaacgacagccggtactgcctgagcagcagactgagagtgtccgccaccttctggcagaacccccggaaccacttcagatgccaggtgcagttctacggcctgagcgagaacgacgagtggacccaggacagagccaagcccgtgacccagatcgtgtctgccgaagcctggggcagagccgattgcggatcccagagcttcggcctgctggaccccaagctgtgctacctgctggatggcatcctgttcatctacggcgtgatcctgaccgccctgttcctgagagtgaagttcagcagaagcgccgacgcccctgcctaccagcagggacagaaccaactgtacaacgagctgaacctgggcagacgggaagagtacgacgtgctggacaagcggagaggcagggaccctgagatgggcggaaagccccagcggagaaagaacccccaggaaggactgtataacgaactccagaaagacaagatggccgaagcctacagcgagatcggcatgaagggcgagcggagaagaggcaagggccacgatggcctgtaccagggcctgagcaccgccaccaaggacacctatgacgccctgcacatgcaggccctgcctccaagaagggccaagcgatctggatctggagcaacaaacttctcactactcaaacaagcaggtgacgtggaggagaatcccgggcctactagtatggactggatttggcgcatccttttccttgtcggcgctgctaccggcgcgcattccttcgaacaagaagtgacacagatccctgccgctctgtctgtgcctgagggcgaaaacctggtgctgaactgctccttcaccgacagcgccatctacaacctccagtggttcaggcaggaccctggaaagggactgacaagcctgctgctgatccagagcagccagagagagcagacctccggcagactgaatgccagcctggataagagcagcggcaggtctaccctgtatatcgccgcttctcagcctggcgatagcgccacatatctgtgtgctgtgcggcctacaagcggcggcagctacatccctacatttggcagaggcaccagcctgatcgtgcacccttatacgcgtgcctctacaaagggaccctccgtgtttcctctggctcccagcagcaagtctacaagcggaggaacagccgctctgggctgcctggtcaaggattactttcccgagcctgtgaccgtgtcctggaatagcggagcactgacaagcggcgtgcacacctttccagccgtgctgcaaagcagcggcctgtactctctgagcagcgtggtcacagtgcctagctctagcctgggcacccagacctacatctgcaatgtgaaccacaagcctagcaacaccaaggtggacaagagagtggaacccaagagctgtacaacgccgggcgaaaggagttccttgccggccttttaccccggcacaagcggaagctgtagtgggtgtggaagcctcagcctcccacttcttgcgggcctcgtcgcggcagatgcagtagcttcacttcttattgtaggcgcggtatttctctgtgctcgaccaaggaggtcacccgctcaggaggatggtaaggtgtatataaatatgccaggacgcggacgcgccaagagaagcggatctggcgtgaagcagaccctgaatttcgacctgctgaagctggctggcgacgtggaatccaacccaggcccttctagaggccatatgaccgagtacaagcccacggtgcgcctcgccacccgcgacgacgtccccagggccgtacgcaccctcgccgccgcgttcgccgactaccccgccacgcgccacaccgtcgatccggaccgccacatcgagcgggtcaccgagctgcaagaactcttcctcacgcgcgtcgggctcgacatcggcaaggtgtgggtcgcggacgacggcgccgcggtggcggtctggaccacgccggagagcgtcgaagcgggggcggtgttcgccgagatcggcccgcgcatggccgagttgagcggttcccggctggccgcgcagcaacagatggaaggcctcctggcgccgcaccggcccaaggagcccgcgtggttcctggccaccgtcggcgtctcgcccgaccaccagggcaagggtctgggcagcgccgtcgtgctccccggagtggaggcggccgagcgcgccggggtgcccgccttcctggagacctccgcgccccgcaacctccccttctacgagcggctcggcttcaccgtcaccgccgacgtcgaggtgcccgaaggaccgcgcacctggtgcatgacccgcaagcccggtgcctga

SEQ ID NO: 9437 - DNA, 2967 bp, Artificial Sequence; identical to SEQ ID NO: 9436
  Synthetic Polynucleotide

SEQ ID NO: 9438 - DNA, 3288 bp, Artificial Sequence
  Synthetic Polynucleotide
atggccttaccagtgaccgccttgctcctgccgctggccttgctgctccacgccgccaggccggaattcaatgctggcgtgacccagacacctaagttccaggtgctgaaaaccggccagagcatgaccctgcaatgcgcccaggacatgaaccatgagtacatgagctggtacagacaggaccccggcatgggcctgagactgatccactactctgtggctatccagaccaccgaccagggcgaagtgcccaatggctacaacgtgtccagaagcaccatcgaggacttcccactgagactgctgtctgccgctcctagccagaccagcgtgtacttttgtgccagcagctacctgggcaacaccggcgagctgttttttggcgagggcagcagactgaccgtgctcgaggacctgaagaacgtgttcccacctgaggtggccgtgttcgagcctagcgaggccgagatcagccacacccagaaagccaccctcgtgtgcctggctaccggcttctaccccgaccatgtggaactgtcttggtgggtcaacggcaaagaggtgcacagcggcgtgtctaccgacccccagccactgaaagaacagcccgccctgaacgacagccggtactgcctgagcagcagactgagagtgtccgccaccttctggcagaacccccggaaccacttcagatgccaggtgcagttctacggcctgagcgagaacgacgagtggacccaggacagagccaagcccgtgacccagatcgtgtctgccgaagcctggggcagagccgattgcggatccacaacacctggcgagagaagtagcctgcctgccttctatcctggcaccagcggctcttgttctggctgtggatctctgagcctgcctctgctggctggactggttgctgctgatgctgtggcctctctgctgattgtgggagccgtgttcctgtgcgccagacctagaagaagccccgctcaagaggacggcaaggtgtacatcaacatgcccggcagaggaagcactagtagagtgaagttcagcagaagcgccgacgcccctgcctaccagcagggacagaaccaactgtacaacgagctgaacctgggcagacgggaagagtacgacgtgctggacaagcggagaggcagggaccctgagatgggcggaaagccccagcggagaaagaacccccaggaaggactgtataacgaactccagaaagacaagatggccgaagcctacagcgagatcggcatgaagggcgagcggagaagaggcaagggccacgatggcctgtaccagggcctgagcaccgccaccaaggacacctatgacgccctgcacatgcaggccctgcctccaagaagggccaagcgatctggatctggagcaacaaacttctcactactcaaacaagcaggtgacgtggaggagaatcccgggcctatggactggatttggcgcatccttttccttgtcggcgctgctaccggcgcgcattccttcgaacaagaagtgacacagatccctgccgctctgtctgtgcctgagggcgaaaacctggtgctgaactgctccttcaccgacagcgccatctacaacctccagtggttcaggcaggaccctggaaagggactgacaagcctgctgctgatccagagcagccagagagagcagacctccggcagactgaatgccagcctggataagagcagcggcaggtctaccctgtatatcgccgcttctcagcctggcgatagcgccacatatctgtgtgctgtgcggcctacaagcggcggcagctacatccctacatttggcagaggcaccagcctgatcgtgcacccttatacgcgtatccagaaccctgatcctgccgtgtaccagctgcgggatagcaagagcagcgacaagagcgtgtgtctgttcaccgacttcgacagccagaccaacgtgtcccagagcaaggactccgacgtgtacatcaccgataagaccgtgctggacatgcggagcatggacttcaagagcaactccgccgtggcctggtccaacaagtccgatttcgcctgcgccaacgccttcaacaacagcattatccccgaggacacattcttcccaagccccgagagcagctgcggtacccagagttttgggttgttggaccctaaattgtgctatctgttggacggaatcctgttcatttacggagtgatcctgaccgcattgttcctgcgggttaagttttccagatccgcagacgcacccgcttaccaacaagggcagaaccaactctacaatgaacttaatttggggcggagggaagagtacgacgttctggacaaaaggaggggacgagatcccgagatgggcggaaagcctcagcgaaggaagaatccgcaagaggggctttataacgaactccagaaagataaaatggcagaagcctatagtgagattgggatgaagggagaaaggaggaggggtaaaggtcacgatgggttgtaccaaggattgagcacagccactaaagatacctatgatgcgctccacatgcaggccctgccgccaagacgcgccaagagaagcggatctggcgtgaagcagaccctgaatttcgacctgctgaagctggctggcgacgtggaatccaacccaggcccttctagaggccatatgaccgagtacaagcccacggtgcgcctcgccacccgcgacgacgtccccagggccgtacgcaccctcgccgccgcgttcgccgactaccccgccacgcgccacaccgtcgatccggaccgccacatcgagcgggtcaccgagctgcaagaactcttcctcacgcgcgtcgggctcgacatcggcaaggtgtgggtcgcggacgacggcgccgcggtggcggtctggaccacgccggagagcgtcgaagcgggggcggtgttcgccgagatcggcccgcgcatggccgagttgagcggttcccggctggccgcgcagcaacagatggaaggcctcctggcgccgcaccggcccaaggagcccgcgtggttcctggccaccgtcggcgtctcgcccgaccaccagggcaagggtctgggcagcgccgtcgtgctccccggagtggaggcggccgagcgcgccggggtgcccgccttcctggagacctccgcgccccgcaacctccccttctacgagcggctcggcttcaccgtcaccgccgacgtcgaggtgcccgaaggaccgcgcacctggtgcatgacccgcaagcccggtgcctga

SEQ ID NO: 9439 - DNA, 2970 bp, Artificial Sequence
  Synthetic Polynucleotide
atggccttaccagtgaccgccttgctcctgccgctggccttgctgctccacgccgccaggccggctatccagaccaccgaccagggcgaagtgcccaatggctacaacgtgtccagaagcaccatcgaggacttcccaaagaagagagagcacttcagcctgatcctggacagcgccaagaccaaccagaccagcgtgtacttctgtgccagcagcagcaccaacaccgaggtgttctttggcaagggcaccagactgaccgtgctcctcgagggacagcctaaggccaatcctaccgtgacactgttccctccaagcagcgaagaactccaggccaacaaggccacacttgtgtgcctgatctccgacttctaccctggggctgtgacagtggcttggaaggccgatggatctcctgtgaaagccggcgtggaaaccaccaagccatccaagcagagcaacaacaaatacgccgccagctcctacctgagcctgacacctgagcagtggaagtcccacagatcctacagctgccaagtgacccacgaaggcagcaccgtggaaaagacagtggcccctacagagtgcagcggatcccagagcttcggcctgctggaccccaagctgtgctacctgctggatggcatcctgttcatctacggcgtgatcctgaccgccctgttcctgagagtgaagttcagcagaagcgccgacgcccctgcctaccagcagggacagaaccaactgtacaacgagctgaacctgggcagacgggaagagtacgacgtgctggacaagcggagaggcagggaccctgagatgggcggaaagccccagcggagaaagaacccccaggaaggactgtataacgaactccagaaagacaagatggccgaagcctacagcgagatcggcatgaagggcgagcggagaagaggcaagggccacgatggcctgtaccagggcctgagcaccgccaccaaggacacctatgacgccctgcacatgcaggccctgcctccaagaagggccaagcgatctggatctggagcaacaaacttctcactactcaaacaagcaggtgacgtggaggagaatcccgggcctactagtatggactggatttggcgcatccttttccttgtcggcgctgctaccggcgcgcattccttcgaagacggcgatagcgtgacccagacagagggactcgtgacactgaccgaaggactgcccgtgatgctgaactgcacctaccagacaatctacagcaaccccttcctgttttggtacgtgcagcacctgaacgagagccccagactgctgctgaagtccttcaccgacaacaagcggacagagcaccagggctttcacgccacactgcacaagagcagctccagcttccatctgcaaaagtctagcgcccagctgagcgacagcgccctgtactactgtgccttcgacaccaacacctacaaagtgatcttcggcaagggcacccatctgcacgtgctgcctaatacgcgtgcctctacaaagggaccctccgtgtttcctctggctcccagcagcaagtctacaagcggaggaacagccgctctgggctgcctggtcaaggattactttcccgagcctgtgaccgtgtcctggaatagcggagcactgacaagcggcgtgcacacctttccagccgtgctgcaaagcagcggcctgtactctctgagcagcgtggtcacagtgcctagctctagcctgggcacccagacctacatctgcaatgtgaaccacaagcctagcaacaccaaggtggacaagagagtggaacccaagagctgtggtacccagagttttgggttgttggaccctaaattgtgctatctgttggacggaatcctgttcatttacggagtgatcctgaccgcattgttcctgcgggttaagttttccagatccgcagacgcacccgcttaccaacaagggcagaaccaactctacaatgaacttaatttggggcggagggaagagtacgacgttctggacaaaaggaggggacgagatcccgagatgggcggaaagcctcagcgaaggaagaatccgcaagaggggctttataacgaactccagaaagataaaatggcagaagcctatagtgagattgggatgaagggagaaaggaggaggggtaaaggtcacgatgggttgtaccaaggattgagcacagccactaaagatacctatgatgcgctccacatgcaggccctgccgccaagacgcgccaagagaagcggatctggcgtgaagcagaccctgaatttcgacctgctgaagctggctggcgacgtggaatccaacccaggcccttctagaggccatatgaccgagtacaagcccacggtgcgcctcgccacccgcgacgacgtccccagggccgtacgcaccctcgccgccgcgttcgccgactaccccgccacgcgccacaccgtcgatccggaccgccacatcgagcgggtcaccgagctgcaagaactcttcctcacgcgcgtcgggctcgacatcggcaaggtgtgggtcgcggacgacggcgccgcggtggcggtctggaccacgccggagagcgtcgaagcgggggcggtgttcgccgagatcggcccgcgcatggccgagttgagcggttcccggctggccgcgcagcaacagatggaaggcctcctggcgccgcaccggcccaaggagcccgcgtggttcctggccaccgtcggcgtctcgcccgaccaccagggcaagggtctgggcagcgccgtcgtgctccccggagtggaggcggccgagcgcgccggggtgcccgccttcctggagacctccgcgccccgcaacctccccttctacgagcggctcggcttcaccgtcaccgccgacgtcgaggtgcccgaaggaccgcgcacctggtgcatgacccgcaagcccggtgcctga

SEQ ID NO: 9440 - DNA, 3024 bp, Artificial Sequence
  Synthetic Polynucleotide
atggccttaccagtgaccgccttgctcctgccgctggccttgctgctccacgccgccaggccggctatccagaccaccgaccagggcgaagtgcccaatggctacaacgtgtccagaagcaccatcgaggacttcccaaagaagagagagcacttcagcctgatcctggacagcgccaagaccaaccagaccagcgtgtacttctgtgccagcagcagcaccaacaccgaggtgttctttggcaagggcaccagactgaccgtgctcctcgagggacagcctaaggccaatcctaccgtgacactgttccctccaagcagcgaagaactccaggccaacaaggccacacttgtgtgcctgatctccgacttctaccctggggctgtgacagtggcttggaaggccgatggatctcctgtgaaagccggcgtggaaaccaccaagccatccaagcagagcaacaacaaatacgccgccagctcctacctgagcctgacacctgagcagtggaagtcccacagatcctacagctgccaagtgacccacgaaggcagcaccgtggaaaagacagtggcccctacagagtgcagcggatcccagagcttcggcctgctggaccccaagctgtgctacctgctggatggcatcctgttcatctacggcgtgatcctgaccgccctgttcctgagagtgaagttcagcagaagcgccgacgcccctgcctaccagcagggacagaaccaactgtacaacgagctgaacctgggcagacgggaagagtacgacgtgctggacaagcggagaggcagggaccctgagatgggcggaaagccccagcggagaaagaacccccaggaaggactgtataacgaactccagaaagacaagatggccgaagcctacagcgagatcggcatgaagggcgagcggagaagaggcaagggccacgatggcctgtaccagggcctgagcaccgccaccaaggacacctatgacgccctgcacatgcaggccctgcctccaagaagggccaagcgatctggatctggagcaacaaacttctcactactcaaacaagcaggtgacgtggaggagaatcccgggcctactagtatggactggatttggcgcatccttttccttgtcggcgctgctaccggcgcgcattccttcgaagacggcgatagcgtgacccagacagagggactcgtgacactgaccgaaggactgcccgtgatgctgaactgcacctaccagacaatctacagcaaccccttcctgttttggtacgtgcagcacctgaacgagagccccagactgctgctgaagtccttcaccgacaacaagcggacagagcaccagggctttcacgccacactgcacaagagcagctccagcttccatctgcaaaagtctagcgcccagctgagcgacagcgccctgtactactgtgccttcgacaccaacacctacaaagtgatcttcggcaagggcacccatctgcacgtgctgcctaatacgcgtgcgtctcccacttctccgaaagttttccccctttccctctgtagcacacaacctgatggaaatgtggtcatcgcatgtctggtacaaggattctttccacaagagccattgagcgttacatggtcagagagcgggcagggagttaccgctaggaatttcccaccctcacaggatgcgagtggtgatctttataccacatcatcacaactcacgttgccagccactcagtgcctcgctggaaagtcagtaacatgccatgtcaaacattacactaatccctcacaagatgttaccgtgccttgcccagtaccttctacgccgcccaccccgtctccatctactccacccacgccatcacctagtggtacccagagttttgggttgttggaccctaaattgtgctatctgttggacggaatcctgttcatttacggagtgatcctgaccgcattgttcctgcgggttaagttttccagatccgcagacgcacccgcttaccaacaagggcagaaccaactctacaatgaacttaatttggggcggagggaagagtacgacgttctggacaaaaggaggggacgagatcccgagatgggcggaaagcctcagcgaaggaagaatccgcaagaggggctttataacgaactccagaaagataaaatggcagaagcctatagtgagattgggatgaagggagaaaggaggaggggtaaaggtcacgatgggttgtaccaaggattgagcacagccactaaagatacctatgatgcgctccacatgcaggccctgccgccaagacgcgccaagagaagcggatctggcgtgaagcagaccctgaatttcgacctgctgaagctggctggcgacgtggaatccaacccaggcccttctagaggccatatgaccgagtacaagcccacggtgcgcctcgccacccgcgacgacgtccccagggccgtacgcaccctcgccgccgcgttcgccgactaccccgccacgcgccacaccgtcgatccggaccgccacatcgagcgggtcaccgagctgcaagaactcttcctcacgcgcgtcgggctcgacatcggcaaggtgtgggtcgcggacgacggcgccgcggtggcggtctggaccacgccggagagcgtcgaagcgggggcggtgttcgccgagatcggcccgcgcatggccgagttgagcggttcccggctggccgcgcagcaacagatggaaggcctcctggcgccgcaccggcccaaggagcccgcgtggttcctggccaccgtcggcgtctcgcccgaccaccagggcaagggtctgggcagcgccgtcgtgctccccggagtggaggcggccgagcgcgccggggtgcccgccttcctggagacctccgcgccccgcaacctccccttctacgagcggctcggcttcaccgtcaccgccgacgtcgaggtgcccgaaggaccgcgcacctggtgcatgacccgcaagcccggtgcctga

SEQ ID NO: 9441 - DNA, 2982 bp, Artificial Sequence
  Synthetic Polynucleotide
gctagcaccatggccttaccagtgaccgccttgctcctgccgctggccttgctgctccacgccgccaggccggctatccagaccaccgaccagggcgaagtgcccaatggctacaacgtgtccagaagcaccatcgaggacttcccaaagaagagagagcacttcagcctgatcctggacagcgccaagaccaaccagaccagcgtgtacttctgtgccagcagcagcaccaacaccgaggtgttctttggcaagggcaccagactgaccgtgctcctcgagggacagcctaaggccaatcctaccgtgacactgttccctccaagcagcgaagaactccaggccaacaaggccacacttgtgtgcctgatctccgacttctaccctggggctgtgacagtggcttggaaggccgatggatctcctgtgaaagccggcgtggaaaccaccaagccatccaagcagagcaacaacaaatacgccgccagctcctacctgagcctgacacctgagcagtggaagtcccacagatcctacagctgccaagtgacccacgaaggcagcaccgtggaaaagacagtggcccctacagagtgcagcggatcccagagcttcggcctgctggaccccaagctgtgctacctgctggatggcatcctgttcatctacggcgtgatcctgaccgccctgttcctgagagtgaagttcagcagaagcgccgacgcccctgcctaccagcagggacagaaccaactgtacaacgagctgaacctgggcagacgggaagagtacgacgtgctggacaagcggagaggcagggaccctgagatgggcggaaagccccagcggagaaagaacccccaggaaggactgtataacgaactccagaaagacaagatggccgaagcctacagcgagatcggcatgaagggcgagcggagaagaggcaagggccacgatggcctgtaccagggcctgagcaccgccaccaaggacacctatgacgccctgcacatgcaggccctgcctccaagaagggccaagcgatctggatctggagcaacaaacttctcactactcaaacaagcaggtgacgtggaggagaatcccgggcctactagtatggactggatttggcgcatccttttccttgtcggcgctgctaccggcgcgcattccttcgaagacggcgatagcgtgacccagacagagggactcgtgacactgaccgaaggactgcccgtgatgctgaactgcacctaccagacaatctacagcaaccccttcctgttttggtacgtgcagcacctgaacgagagccccagactgctgctgaagtccttcaccgacaacaagcggacagagcaccagggctttcacgccacactgcacaagagcagctccagcttccatctgcaaaagtctagcgcccagctgagcgacagcgccctgtactactgtgccttcgacaccaacacctacaaagtgatcttcggcaagggcacccatctgcacgtgctgcctaatacgcgtgcctccacgaagggaccatctgttttccctcttgccccctgctcacggtcaacgtctgaatccacggcagccctgggctgcctcgttaaggactactttccagagccggtaacagtctcctggaacagtggagcccttacatcaggtgttcacactttccctgccgtcttgcaaagtagcggactgtacagccttagttccgttgttacggttccttctagcaacttcggtacacagacatatacttgtaacgtagatcataagcctagcaacaccaaggtggacaaaaccgtagagagaaagtgtggtacccagagttttgggttgttggaccctaaattgtgctatctgttggacggaatcctgttcatttacggagtgatcctgaccgcattgttcctgcgggttaagttttccagatccgcagacgcacccgcttaccaacaagggcagaaccaactctacaatgaacttaatttggggcggagggaagagtacgacgttctggacaaaaggaggggacgagatcccgagatgggcggaaagcctcagcgaaggaagaatccgcaagaggggctttataacgaactccagaaagataaaatggcagaagcctatagtgagattgggatgaagggagaaaggaggaggggtaaaggtcacgatgggttgtaccaaggattgagcacagccactaaagatacctatgatgcgctccacatgcaggccctgccgccaagacgcgccaagagaagcggatctggcgtgaagcagaccctgaatttcgacctgctgaagctggctggcgacgtggaatccaacccaggcccttctagaggccatatgaccgagtacaagcccacggtgcgcctcgccacccgcgacgacgtccccagggccgtacgcaccctcgccgccgcgttcgccgactaccccgccacgcgccacaccgtcgatccggaccgccacatcgagcgggtcaccgagctgcaagaactcttcctcacgcgcgtcgggctcgacatcggcaaggtgtgggtcgcggacgacggcgccgcggtggcggtctggaccacgccggagagcgtcgaagcgggggcggtgttcgccgagatcggcccgcgcatggccgagttgagcggttcccggctggccgcgcagcaacagatggaaggcctcctggcgccgcaccggcccaaggagcccgcgtggttcctggccaccgtcggcgtctcgcccgaccaccagggcaagggtctgggcagcgccgtcgtgctccccggagtggaggcggccgagcgcgccggggtgcccgccttcctggagacctccgcgccccgcaacctccccttctacgagcggctcggcttcaccgtcaccgccgacgtcgaggtgcccgaaggaccgcgcacctggtgcatgacccgcaagcccggtgcctgagtcgac

SEQ ID NO: 9442 - DNA, 3273 bp, Artificial Sequence
  Synthetic Polynucleotide
atggccttaccagtgaccgccttgctcctgccgctggccttgctgctccacgccgccaggccgctggtggacatgaaagtgacccagatgcctcgctacctgattaagcggatgggcgagaacgtgctgctggaatgcggccaggatatgagccacgagacaatgtactggtacagacaggaccctggcctgggcctccagctgatctacatctcctacgacgtggacagcaacagcgagggcgacatccctaagggctacagagtgtcccggaagaagagagagcacttcagcctgatcctggacagcgccaagaccaaccagaccagcgtgtacttctgtgccagcagcagcaccaacaccgaggtgttctttggcaagggcaccagactgaccgtgctcctcgagggacagcctaaggccaatcctaccgtgacactgttccctccaagcagcgaagaactccaggccaacaaggccacacttgtgtgcctgatctccgacttctaccctggggctgtgacagtggcttggaaggccgatggatctcctgtgaaagccggcgtggaaaccaccaagccatccaagcagagcaacaacaaatacgccgccagctcctacctgagcctgacacctgagcagtggaagtcccacagatcctacagctgccaagtgacccacgaaggcagcaccgtggaaaagacagtggcccctacagagtgcagcggatcccagagcttcggcctgctggaccccaagctgtgctacctgctggatggcatcctgttcatctacggcgtgatcctgaccgccctgttcctgagagtgaagttcagcagaagcgccgacgcccctgcctaccagcagggacagaaccaactgtacaacgagctgaacctgggcagacgggaagagtacgacgtgctggacaagcggagaggcagggaccctgagatgggcggaaagccccagcggagaaagaacccccaggaaggactgtataacgaactccagaaagacaagatggccgaagcctacagcgagatcggcatgaagggcgagcggagaagaggcaagggccacgatggcctgtaccagggcctgagcaccgccaccaaggacacctatgacgccctgcacatgcaggccctgcctccaagaagggccaagcgatctggatctggagcaacaaacttctcactactcaaacaagcaggtgacgtggaggagaatcccgggcctactagtatggactggatttggcgcatccttttccttgtcggcgctgctaccggcgcgcattccttcgaagacggcgatagcgtgacccagacagagggactcgtgacactgaccgaaggactgcccgtgatgctgaactgcacctaccagacaatctacagcaaccccttcctgttttggtacgtgcagcacctgaacgagagccccagactgctgctgaagtccttcaccgacaacaagcggacagagcaccagggctttcacgccacactgcacaagagcagctccagcttccatctgcaaaagtctagcgcccagctgagcgacagcgccctgtactactgtgccttcgacaccaacacctacaaagtgatcttcggcaagggcacccatctgcacgtgctgcctaatacgcgtgctccgacaaaggcgccagacgtttttcctattatttcaggatgtcggcatccgaaagataattccccagttgttctggcgtgtcttatcacgggctaccatcctacatctgttaccgttacgtggtatatgggtacgcaaagccaacctcagcggacttttccagagatccaacggcgagattcatattatatgacatccagtcagttgagtacaccgctgcaacagtggcggcaaggtgagtataagtgtgtggtccaacacacagccagtaaaagtaagaaagagatattccggtggcctgaaagcccgaaggcacaagcatcttctgttccgacggcgcaaccgcaagctgaaggaagtcttgcaaaagcaaccacagcacccgcgacaacacgaaacacaggacgcggaggcgaggaaaagaaaaaagaaaaggaaaaggaagagcaagaggagagggaaactaagacccccggtacccagagttttgggttgttggaccctaaattgtgctatctgttggacggaatcctgttcatttacggagtgatcctgaccgcattgttcctgcgggttaagttttccagatccgcagacgcacccgcttaccaacaagggcagaaccaactctacaatgaacttaatttggggcggagggaagagtacgacgttctggacaaaaggaggggacgagatcccgagatgggcggaaagcctcagcgaaggaagaatccgcaagaggggctttataacgaactccagaaagataaaatggcagaagcctatagtgagattgggatgaagggagaaaggaggaggggtaaaggtcacgatgggttgtaccaaggattgagcacagccactaaagatacctatgatgcgctccacatgcaggccctgccgccaagacgcgccaagagaagcggatctggcgtgaagcagaccctgaatttcgacctgctgaagctggctggcgacgtggaatccaacccaggcccttctagaggccatatgaccgagtacaagcccacggtgcgcctcgccacccgcgacgacgtccccagggccgtacgcaccctcgccgccgcgttcgccgactaccccgccacgcgccacaccgtcgatccggaccgccacatcgagcgggtcaccgagctgcaagaactcttcctcacgcgcgtcgggctcgacatcggcaaggtgtgggtcgcggacgacggcgccgcggtggcggtctggaccacgccggagagcgtcgaagcgggggcggtgttcgccgagatcggcccgcgcatggccgagttgagcggttcccggctggccgcgcagcaacagatggaaggcctcctggcgccgcaccggcccaaggagcccgcgtggttcctggccaccgtcggcgtctcgcccgaccaccagggcaagggtctgggcagcgccgtcgtgctccccggagtggaggcggccgagcgcgccggggtgcccgccttcctggagacctccgcgccccgcaacctccccttctacgagcggctcggcttcaccgtcaccgccgacgtcgaggtgcccgaaggaccgcgcacctggtgcatgacccgcaagcccggtgcctga

SEQ ID NO: 9443 - DNA, 3099 bp, Artificial Sequence
  Synthetic Polynucleotide
atggccttaccagtgaccgccttgctcctgccgctggccttgctgctccacgccgccaggccgctggtggacatgaaagtgacccagatgcctcgctacctgattaagcggatgggcgagaacgtgctgctggaatgcggccaggatatgagccacgagacaatgtactggtacagacaggaccctggcctgggcctccagctgatctacatctcctacgacgtggacagcaacagcgagggcgacatccctaagggctacagagtgtcccggaagaagagagagcacttcagcctgatcctggacagcgccaagaccaaccagaccagcgtgtacttctgtgccagcagcagcaccaacaccgaggtgttctttggcaagggcaccagactgaccgtgctcctcgagggacagcctaaggccaatcctaccgtgacactgttccctccaagcagcgaagaactccaggccaacaaggccacacttgtgtgcctgatctccgacttctaccctggggctgtgacagtggcttggaaggccgatggatctcctgtgaaagccggcgtggaaaccaccaagccatccaagcagagcaacaacaaatacgccgccagctcctacctgagcctgacacctgagcagtggaagtcccacagatcctacagctgccaagtgacccacgaaggcagcaccgtggaaaagacagtggcccctacagagtgcagcggatcccagagcttcggcctgctggaccccaagctgtgctacctgctggatggcatcctgttcatctacggcgtgatcctgaccgccctgttcctgagagtgaagttcagcagaagcgccgacgcccctgcctaccagcagggacagaaccaactgtacaacgagctgaacctgggcagacgggaagagtacgacgtgctggacaagcggagaggcagggaccctgagatgggcggaaagccccagcggagaaagaacccccaggaaggactgtataacgaactccagaaagacaagatggccgaagcctacagcgagatcggcatgaagggcgagcggagaagaggcaagggccacgatggcctgtaccagggcctgagcaccgccaccaaggacacctatgacgccctgcacatgcaggccctgcctccaagaagggccaagcgatctggatctggagcaacaaacttctcactactcaaacaagcaggtgacgtggaggagaatcccgggcctactagtatggactggatttggcgcatccttttccttgtcggcgctgctaccggcgcgcattccttcgaagacggcgatagcgtgacccagacagagggactcgtgacactgaccgaaggactgcccgtgatgctgaactgcacctaccagacaatctacagcaaccccttcctgttttggtacgtgcagcacctgaacgagagccccagactgctgctgaagtccttcaccgacaacaagcggacagagcaccagggctttcacgccacactgcacaagagcagctccagcttccatctgcaaaagtctagcgcccagctgagcgacagcgccctgtactactgtgccttcgacaccaacacctacaaagtgatcttcggcaagggcacccatctgcacgtgctgcctaatacgcgtgcctcaacgaaagggcctagcgtcttccccctggcgccgtgctcacgatccacaagcgaatccaccgccgctctcggatgcctcgtaaaggattatttccctgaaccagtcacggtgtcatggaacagcggtgcccttaccagcggcgtccatacctttcctgctgtgctccagtccagcggactttatagtctcagctctgtcgtgaccgtcccttcctctaattttggcacccagacttacacgtgcaacgtcgatcataagcccagtaacaccaaggtagacaagacggtggaacgaaagggtacccagagttttgggttgttggaccctaaattgtgctatctgttggacggaatcctgttcatttacggagtgatcctgaccgcattgttcctgcgggttaagttttccagatccgcagacgcacccgcttaccaacaagggcagaaccaactctacaatgaacttaatttggggcggagggaagagtacgacgttctggacaaaaggaggggacgagatcccgagatgggcggaaagcctcagcgaaggaagaatccgcaagaggggctttataacgaactccagaaagataaaatggcagaagcctatagtgagattgggatgaagggagaaaggaggaggggtaaaggtcacgatgggttgtaccaaggattgagcacagccactaaagatacctatgatgcgctccacatgcaggccctgccgccaagacgcgccaagagaagcggatctggcgtgaagcagaccctgaatttcgacctgctgaagctggctggcgacgtggaatccaacccaggcccttctagaggccatatgaccgagtacaagcccacggtgcgcctcgccacccgcgacgacgtccccagggccgtacgcaccctcgccgccgcgttcgccgactaccccgccacgcgccacaccgtcgatccggaccgccacatcgagcgggtcaccgagctgcaagaactcttcctcacgcgcgtcgggctcgacatcggcaaggtgtgggtcgcggacgacggcgccgcggtggcggtctggaccacgccggagagcgtcgaagcgggggcggtgttcgccgagatcggcccgcgcatggccgagttgagcggttcccggctggccgcgcagcaacagatggaaggcctcctggcgccgcaccggcccaaggagcccgcgtggttcctggccaccgtcggcgtctcgcccgaccaccagggcaagggtctgggcagcgccgtcgtgctccccggagtggaggcggccgagcgcgccggggtgcccgccttcctggagacctccgcgccccgcaacctccccttctacgagcggctcggcttcaccgtcaccgccgacgtcgaggtgcccgaaggaccgcgcacctggtgcatgacccgcaagcccggtgcctga

SEQ ID NO: 9444 - DNA, 3126 bp, Artificial Sequence
  Synthetic Polynucleotide
atggccttaccagtgaccgccttgctcctgccgctggccttgctgctccacgccgccaggccgctggtggacatgaaagtgacccagatgcctcgctacctgattaagcggatgggcgagaacgtgctgctggaatgcggccaggatatgagccacgagacaatgtactggtacagacaggaccctggcctgggcctccagctgatctacatctcctacgacgtggacagcaacagcgagggcgacatccctaagggctacagagtgtcccggaagaagagagagcacttcagcctgatcctggacagcgccaagaccaaccagaccagcgtgtacttctgtgccagcagcagcaccaacaccgaggtgttctttggcaagggcaccagactgaccgtgctcctcgagggacagcctaaggccaatcctaccgtgacactgttccctccaagcagcgaagaactccaggccaacaaggccacacttgtgtgcctgatctccgacttctaccctggggctgtgacagtggcttggaaggccgatggatctcctgtgaaagccggcgtggaaaccaccaagccatccaagcagagcaacaacaaatacgccgccagctcctacctgagcctgacacctgagcagtggaagtcccacagatcctacagctgccaagtgacccacgaaggcagcaccgtggaaaagacagtggcccctacagagtgcagcggatcccagagcttcggcctgctggaccccaagctgtgctacctgctggatggcatcctgttcatctacggcgtgatcctgaccgccctgttcctgagagtgaagttcagcagaagcgccgacgcccctgcctaccagcagggacagaaccaactgtacaacgagctgaacctgggcagacgggaagagtacgacgtgctggacaagcggagaggcagggaccctgagatgggcggaaagccccagcggagaaagaacccccaggaaggactgtataacgaactccagaaagacaagatggccgaagcctacagcgagatcggcatgaagggcgagcggagaagaggcaagggccacgatggcctgtaccagggcctgagcaccgccaccaaggacacctatgacgccctgcacatgcaggccctgcctccaagaagggccaagcgatctggatctggagcaacaaacttctcactactcaaacaagcaggtgacgtggaggagaatcccgggcctactagtatggactggatttggcgcatccttttccttgtcggcgctgctaccggcgcgcattccttcgaagacggcgatagcgtgacccagacagagggactcgtgacactgaccgaaggactgcccgtgatgctgaactgcacctaccagacaatctacagcaaccccttcctgttttggtacgtgcagcacctgaacgagagccccagactgctgctgaagtccttcaccgacaacaagcggacagagcaccagggctttcacgccacactgcacaagagcagctccagcttccatctgcaaaagtctagcgcccagctgagcgacagcgccctgtactactgtgccttcgacaccaacacctacaaagtgatcttcggcaagggcacccatctgcacgtgctgcctaatacgcgtgcgtcacctacgtccccaaaagtgttcccgctgtcactcgattccactccacaggacggtaacgtggtggttgcctgcctggtacaaggtttctttcctcaagaaccactctctgtgacgtggtctgaaagtggtcagaatgttacagcacggaacttcccaccgagtcaagatgcgagtggggatctctatacgacatccagtcaactcacactgcccgcaacacaatgccccgatggcaaatctgttacctgccatgtgaaacattacaccaatccatcccaggatgtgacagtaccttgtccggttccgccccctcccccgggtacccagagttttgggttgttggaccctaaattgtgctatctgttggacggaatcctgttcatttacggagtgatcctgaccgcattgttcctgcgggttaagttttccagatccgcagacgcacccgcttaccaacaagggcagaaccaactctacaatgaacttaatttggggcggagggaagagtacgacgttctggacaaaaggaggggacgagatcccgagatgggcggaaagcctcagcgaaggaagaatccgcaagaggggctttataacgaactccagaaagataaaatggcagaagcctatagtgagattgggatgaagggagaaaggaggaggggtaaaggtcacgatgggttgtaccaaggattgagcacagccactaaagatacctatgatgcgctccacatgcaggccctgccgccaagacgcgccaagagaagcggatctggcgtgaagcagaccctgaatttcgacctgctgaagctggctggcgacgtggaatccaacccaggcccttctagaggccatatgaccgagtacaagcccacggtgcgcctcgccacccgcgacgacgtccccagggccgtacgcaccctcgccgccgcgttcgccgactaccccgccacgcgccacaccgtcgatccggaccgccacatcgagcgggtcaccgagctgcaagaactcttcctcacgcgcgtcgggctcgacatcggcaaggtgtgggtcgcggacgacggcgccgcggtggcggtctggaccacgccggagagcgtcgaagcgggggcggtgttcgccgagatcggcccgcgcatggccgagttgagcggttcccggctggccgcgcagcaacagatggaaggcctcctggcgccgcaccggcccaaggagcccgcgtggttcctggccaccgtcggcgtctcgcccgaccaccagggcaagggtctgggcagcgccgtcgtgctccccggagtggaggcggccgagcgcgccggggtgcccgccttcctggagacctccgcgccccgcaacctccccttctacgagcggctcggcttcaccgtcaccgccgacgtcgaggtgcccgaaggaccgcgcacctggtgcatgacccgcaagcccggtgcctgagtcgac

SEQ ID NO: 9445 - DNA, 3105 bp, Artificial Sequence
  Synthetic Polynucleotide
atggccttaccagtgaccgccttgctcctgccgctggccttgctgctccacgccgccaggccgctggtggacatgaaagtgacccagatgcctcgctacctgattaagcggatgggcgagaacgtgctgctggaatgcggccaggatatgagccacgagacaatgtactggtacagacaggaccctggcctgggcctccagctgatctacatctcctacgacgtggacagcaacagcgagggcgacatccctaagggctacagagtgtcccggaagaagagagagcacttcagcctgatcctggacagcgccaagaccaaccagaccagcgtgtacttctgtgccagcagcagcaccaacaccgaggtgttctttggcaagggcaccagactgaccgtgctcctcgagggacagcctaaggccaatcctaccgtgacactgttccctccaagcagcgaagaactccaggccaacaaggccacacttgtgtgcctgatctccgacttctaccctggggctgtgacagtggcttggaaggccgatggatctcctgtgaaagccggcgtggaaaccaccaagccatccaagcagagcaacaacaaatacgccgccagctcctacctgagcctgacacctgagcagtggaagtcccacagatcctacagctgccaagtgacccacgaaggcagcaccgtggaaaagacagtggcccctacagagtgcagcggatcccagagcttcggcctgctggaccccaagctgtgctacctgctggatggcatcctgttcatctacggcgtgatcctgaccgccctgttcctgagagtgaagttcagcagaagcgccgacgcccctgcctaccagcagggacagaaccaactgtacaacgagctgaacctgggcagacgggaagagtacgacgtgctggacaagcggagaggcagggaccctgagatgggcggaaagccccagcggagaaagaacccccaggaaggactgtataacgaactccagaaagacaagatggccgaagcctacagcgagatcggcatgaagggcgagcggagaagaggcaagggccacgatggcctgtaccagggcctgagcaccgccaccaaggacacctatgacgccctgcacatgcaggccctgcctccaagaagggccaagcgatctggatctggagcaacaaacttctcactactcaaacaagcaggtgacgtggaggagaatcccgggcctactagtatggactggatttggcgcatccttttccttgtcggcgctgctaccggcgcgcattccttcgaagacggcgatagcgtgacccagacagagggactcgtgacactgaccgaaggactgcccgtgatgctgaactgcacctaccagacaatctacagcaaccccttcctgttttggtacgtgcagcacctgaacgagagccccagactgctgctgaagtccttcaccgacaacaagcggacagagcaccagggctttcacgccacactgcacaagagcagctccagcttccatctgcaaaagtctagcgcccagctgagcgacagcgccctgtactactgtgccttcgacaccaacacctacaaagtgatcttcggcaagggcacccatctgcacgtgctgcctaatacgcgtgctagtacccagtcaccttctgttttcccgcttactagatgctgcaagaacataccatccaatgccacttctgtcacactgggctgtcttgctacaggttattttcctgagccggtgatggtcacttgggataccggtagcctgaatggaactacaatgacgctgcctgccacgacgctcacattgagtgggcattacgcgacaattagtcttttgacggtaagcggagcttgggctaagcagatgttcacttgcagagtagcgcacactccctctagtactgactgggttgacaacaaaaccttttctggtacccagagttttgggttgttggaccctaaattgtgctatctgttggacggaatcctgttcatttacggagtgatcctgaccgcattgttcctgcgggttaagttttccagatccgcagacgcacccgcttaccaacaagggcagaaccaactctacaatgaacttaatttggggcggagggaagagtacgacgttctggacaaaaggaggggacgagatcccgagatgggcggaaagcctcagcgaaggaagaatccgcaagaggggctttataacgaactccagaaagataaaatggcagaagcctatagtgagattgggatgaagggagaaaggaggaggggtaaaggtcacgatgggttgtaccaaggattgagcacagccactaaagatacctatgatgcgctccacatgcaggccctgccgccaagacgcgccaagagaagcggatctggcgtgaagcagaccctgaatttcgacctgctgaagctggctggcgacgtggaatccaacccaggcccttctagaggccatatgaccgagtacaagcccacggtgcgcctcgccacccgcgacgacgtccccagggccgtacgcaccctcgccgccgcgttcgccgactaccccgccacgcgccacaccgtcgatccggaccgccacatcgagcgggtcaccgagctgcaagaactcttcctcacgcgcgtcgggctcgacatcggcaaggtgtgggtcgcggacgacggcgccgcggtggcggtctggaccacgccggagagcgtcgaagcgggggcggtgttcgccgagatcggcccgcgcatggccgagttgagcggttcccggctggccgcgcagcaacagatggaaggcctcctggcgccgcaccggcccaaggagcccgcgtggttcctggccaccgtcggcgtctcgcccgaccaccagggcaagggtctgggcagcgccgtcgtgctccccggagtggaggcggccgagcgcgccggggtgcccgccttcctggagacctccgcgccccgcaacctccccttctacgagcggctcggcttcaccgtcaccgccgacgtcgaggtgcccgaaggaccgcgcacctggtgcatgacccgcaagcccggtgcctga

SEQ ID NO: 9446 - DNA, 3105 bp, Artificial Sequence
  Synthetic Polynucleotide
atggccttaccagtgaccgccttgctcctgccgctggccttgctgctccacgccgccaggccgctggtggacatgaaagtgacccagatgcctcgctacctgattaagcggatgggcgagaacgtgctgctggaatgcggccaggatatgagccacgagacaatgtactggtacagacaggaccctggcctgggcctccagctgatctacatctcctacgacgtggacagcaacagcgagggcgacatccctaagggctacagagtgtcccggaagaagagagagcacttcagcctgatcctggacagcgccaagaccaaccagaccagcgtgtacttctgtgccagcagcagcaccaacaccgaggtgttctttggcaagggcaccagactgaccgtgctcctcgagggacagcctaaggccaatcctaccgtgacactgttccctccaagcagcgaagaactccaggccaacaaggccacacttgtgtgcctgatctccgacttctaccctggggctgtgacagtggcttggaaggccgatggatctcctgtgaaagccggcgtggaaaccaccaagccatccaagcagagcaacaacaaatacgccgccagctcctacctgagcctgacacctgagcagtggaagtcccacagatcctacagctgccaagtgacccacgaaggcagcaccgtggaaaagacagtggcccctacagagtgcagcggatcccagagcttcggcctgctggaccccaagctgtgctacctgctggatggcatcctgttcatctacggcgtgatcctgaccgccctgttcctgagagtgaagttcagcagaagcgccgacgcccctgcctaccagcagggacagaaccaactgtacaacgagctgaacctgggcagacgggaagagtacgacgtgctggacaagcggagaggcagggaccctgagatgggcggaaagccccagcggagaaagaacccccaggaaggactgtataacgaactccagaaagacaagatggccgaagcctacagcgagatcggcatgaagggcgagcggagaagaggcaagggccacgatggcctgtaccagggcctgagcaccgccaccaaggacacctatgacgccctgcacatgcaggccctgcctccaagaagggccaagcgatctggatctggagcaacaaacttctcactactcaaacaagcaggtgacgtggaggagaatcccgggcctactagtatggactggatttggcgcatccttttccttgtcggcgctgctaccggcgcgcattccttcgaagacggcgatagcgtgacccagacagagggactcgtgacactgaccgaaggactgcccgtgatgctgaactgcacctaccagacaatctacagcaaccccttcctgttttggtacgtgcagcacctgaacgagagccccagactgctgctgaagtccttcaccgacaacaagcggacagagcaccagggctttcacgccacactgcacaagagcagctccagcttccatctgcaaaagtctagcgcccagctgagcgacagcgccctgtactactgtgccttcgacaccaacacctacaaagtgatcttcggcaagggcacccatctgcacgtgctgcctaatacgcgtgcgtccactaagggtccgtcagtcttcccgctggcgccctgttcccgcagcacgagtgaatctaccgccgcccttgggtgcttggtaaaagactattttcctgagcccgttacagtatcatggaacagcggggctctgactagcggggtgcatacgttccctgcggttctgcaatctagcggactgtattctctctccagtgttgtgaccgtgccaagctccagcctcggtactaaaacttatacatgtaatgtggatcataaaccttcaaataccaaggttgacaaaagggtagagagtaagtacggtggtacccagagttttgggttgttggaccctaaattgtgctatctgttggacggaatcctgttcatttacggagtgatcctgaccgcattgttcctgcgggttaagttttccagatccgcagacgcacccgcttaccaacaagggcagaaccaactctacaatgaacttaatttggggcggagggaagagtacgacgttctggacaaaaggaggggacgagatcccgagatgggcggaaagcctcagcgaaggaagaatccgcaagaggggctttataacgaactccagaaagataaaatggcagaagcctatagtgagattgggatgaagggagaaaggaggaggggtaaaggtcacgatgggttgtaccaaggattgagcacagccactaaagatacctatgatgcgctccacatgcaggccctgccgccaagacgcgccaagagaagcggatctggcgtgaagcagaccctgaatttcgacctgctgaagctggctggcgacgtggaatccaacccaggcccttctagaggccatatgaccgagtacaagcccacggtgcgcctcgccacccgcgacgacgtccccagggccgtacgcaccctcgccgccgcgttcgccgactaccccgccacgcgccacaccgtcgatccggaccgccacatcgagcgggtcaccgagctgcaagaactcttcctcacgcgcgtcgggctcgacatcggcaaggtgtgggtcgcggacgacggcgccgcggtggcggtctggaccacgccggagagcgtcgaagcgggggcggtgttcgccgagatcggcccgcgcatggccgagttgagcggttcccggctggccgcgcagcaacagatggaaggcctcctggcgccgcaccggcccaaggagcccgcgtggttcctggccaccgtcggcgtctcgcccgaccaccagggcaagggtctgggcagcgccgtcgtgctccccggagtggaggcggccgagcgcgccggggtgcccgccttcctggagacctccgcgccccgcaacctccccttctacgagcggctcggcttcaccgtcaccgccgacgtcgaggtgcccgaaggaccgcgcacctggtgcatgacccgcaagcccggtgcctga

SEQ ID NO: 9447 - DNA, 3105 bp, Artificial Sequence
  Synthetic Polynucleotide
atggccttaccagtgaccgccttgctcctgccgctggccttgctgctccacgccgccaggccgctggtggacatgaaagtgacccagatgcctcgctacctgattaagcggatgggcgagaacgtgctgctggaatgcggccaggatatgagccacgagacaatgtactggtacagacaggaccctggcctgggcctccagctgatctacatctcctacgacgtggacagcaacagcgagggcgacatccctaagggctacagagtgtcccggaagaagagagagcacttcagcctgatcctggacagcgccaagaccaaccagaccagcgtgtacttctgtgccagcagcagcaccaacaccgaggtgttctttggcaagggcaccagactgaccgtgctcctcgagggacagcctaaggccaatcctaccgtgacactgttccctccaagcagcgaagaactccaggccaacaaggccacacttgtgtgcctgatctccgacttctaccctggggctgtgacagtggcttggaaggccgatggatctcctgtgaaagccggcgtggaaaccaccaagccatccaagcagagcaacaacaaatacgccgccagctcctacctgagcctgacacctgagcagtggaagtcccacagatcctacagctgccaagtgacccacgaaggcagcaccgtggaaaagacagtggcccctacagagtgcagcggatcccagagcttcggcctgctggaccccaagctgtgctacctgctggatggcatcctgttcatctacggcgtgatcctgaccgccctgttcctgagagtgaagttcagcagaagcgccgacgcccctgcctaccagcagggacagaaccaactgtacaacgagctgaacctgggcagacgggaagagtacgacgtgctggacaagcggagaggcagggaccctgagatgggcggaaagccccagcggagaaagaacccccaggaaggactgtataacgaactccagaaagacaagatggccgaagcctacagcgagatcggcatgaagggcgagcggagaagaggcaagggccacgatggcctgtaccagggcctgagcaccgccaccaaggacacctatgacgccctgcacatgcaggccctgcctccaagaagggccaagcgatctggatctggagcaacaaacttctcactactcaaacaagcaggtgacgtggaggagaatcccgggcctactagtatggactggatttggcgcatccttttccttgtcggcgctgctaccggcgcgcattccttcgaagacggcgatagcgtgacccagacagagggactcgtgacactgaccgaaggactgcccgtgatgctgaactgcacctaccagacaatctacagcaaccccttcctgttttggtacgtgcagcacctgaacgagagccccagactgctgctgaagtccttcaccgacaacaagcggacagagcaccagggctttcacgccacactgcacaagagcagctccagcttccatctgcaaaagtctagcgcccagctgagcgacagcgccctgtactactgtgccttcgacaccaacacctacaaagtgatcttcggcaagggcacccatctgcacgtgctgcctaatacgcgtgcaagtacaaagggacccagtgttttcccgctcgccccctgttcacgatcaacgagtgagtccactgcggctctcggatgcctcgtcaaagactacttccccgagccggtgactgttagttggaactctggggctcttacttcaggcgtacacacattccccgccgtgcttcagtcaagtgggctctactcacttagcagtgtggtaacggttccctctagcaactttggcacccaaacatatacttgcaacgtcgatcacaagccgtcaaataccaaagttgacaagaccgttgaaaggaaatgttgtggtacccagagttttgggttgttggaccctaaattgtgctatctgttggacggaatcctgttcatttacggagtgatcctgaccgcattgttcctgcgggttaagttttccagatccgcagacgcacccgcttaccaacaagggcagaaccaactctacaatgaacttaatttggggcggagggaagagtacgacgttctggacaaaaggaggggacgagatcccgagatgggcggaaagcctcagcgaaggaagaatccgcaagaggggctttataacgaactccagaaagataaaatggcagaagcctatagtgagattgggatgaagggagaaaggaggaggggtaaaggtcacgatgggttgtaccaaggattgagcacagccactaaagatacctatgatgcgctccacatgcaggccctgccgccaagacgcgccaagagaagcggatctggcgtgaagcagaccctgaatttcgacctgctgaagctggctggcgacgtggaatccaacccaggcccttctagaggccatatgaccgagtacaagcccacggtgcgcctcgccacccgcgacgacgtccccagggccgtacgcaccctcgccgccgcgttcgccgactaccccgccacgcgccacaccgtcgatccggaccgccacatcgagcgggtcaccgagctgcaagaactcttcctcacgcgcgtcgggctcgacatcggcaaggtgtgggtcgcggacgacggcgccgcggtggcggtctggaccacgccggagagcgtcgaagcgggggcggtgttcgccgagatcggcccgcgcatggccgagttgagcggttcccggctggccgcgcagcaacagatggaaggcctcctggcgccgcaccggcccaaggagcccgcgtggttcctggccaccgtcggcgtctcgcccgaccaccagggcaagggtctgggcagcgccgtcgtgctccccggagtggaggcggccgagcgcgccggggtgcccgccttcctggagacctccgcgccccgcaacctccccttctacgagcggctcggcttcaccgtcaccgccgacgtcgaggtgcccgaaggaccgcgcacctggtgcatgacccgcaagcccggtgcctga

SEQ ID NO: 9448 - DNA, 3150 bp, Artificial Sequence
  Synthetic Polynucleotide
atggccttaccagtgaccgccttgctcctgccgctggccttgctgctccacgccgccaggccgctggtggacatgaaagtgacccagatgcctcgctacctgattaagcggatgggcgagaacgtgctgctggaatgcggccaggatatgagccacgagacaatgtactggtacagacaggaccctggcctgggcctccagctgatctacatctcctacgacgtggacagcaacagcgagggcgacatccctaagggctacagagtgtcccggaagaagagagagcacttcagcctgatcctggacagcgccaagaccaaccagaccagcgtgtacttctgtgccagcagcagcaccaacaccgaggtgttctttggcaagggcaccagactgaccgtgctcctcgaggacctgaagaacgtgttcccacctgaggtggccgtgttcgagcctagcgaggccgagatcagccacacccagaaagccaccctcgtgtgcctggctaccggcttctaccccgaccatgtggaactgtcttggtgggtcaacggcaaagaggtgcacagcggcgtgtctaccgacccccagccactgaaagaacagcccgccctgaacgacagccggtactgcctgagcagcagactgagagtgtccgccaccttctggcagaacccccggaaccacttcagatgccaggtgcagttctacggcctgagcgagaacgacgagtggacccaggacagagccaagcccgtgacccagatcgtgtctgccgaagcctggggcagagccgattgcggatcccagagcttcggcctgctggaccccaagctgtgctacctgctggatggcatcctgttcatctacggcgtgatcctgaccgccctgttcctgagagtgaagttcagcagaagcgccgacgcccctgcctaccagcagggacagaaccaactgtacaacgagctgaacctgggcagacgggaagagtacgacgtgctggacaagcggagaggcagggaccctgagatgggcggaaagccccagcggagaaagaacccccaggaaggactgtataacgaactccagaaagacaagatggccgaagcctacagcgagatcggcatgaagggcgagcggagaagaggcaagggccacgatggcctgtaccagggcctgagcaccgccaccaaggacacctatgacgccctgcacatgcaggccctgcctccaagaagggccaagcgatctggatctggagcaacaaacttctcactactcaaacaagcaggtgacgtggaggagaatcccgggcctactagtatggactggatttggcgcatccttttccttgtcggcgctgctaccggcgcgcattccttcgaagacggcgatagcgtgacccagacagagggactcgtgacactgaccgaaggactgcccgtgatgctgaactgcacctaccagacaatctacagcaaccccttcctgttttggtacgtgcagcacctgaacgagagccccagactgctgctgaagtccttcaccgacaacaagcggacagagcaccagggctttcacgccacactgcacaagagcagctccagcttccatctgcaaaagtctagcgcccagctgagcgacagcgccctgtactactgtgccttcgacaccaacacctacaaagtgatcttcggcaagggcacccatctgcacgtgctgcctaatacgcgtatccagaaccctgatcctgccgtgtaccagctgcgggatagcaagagcagcgacaagagcgtgtgtctgttcaccgacttcgacagccagaccaacgtgtcccagagcaaggactccgacgtgtacatcaccgataagaccgtgctggacatgcggagcatggacttcaagagcaactccgccgtggcctggtccaacaagtccgatttcgcctgcgccaacgccttcaacaacagcattatccccgaggacacattcttcccaagccccgagagcagctgcggtacccagagttttgggttgttggaccctaaattgtgctatctgttggacggaatcctgttcatttacggagtgatcctgaccgcattgttcctgcgggttaagttttccagatccgcagacgcacccgcttaccaacaagggcagaaccaactctacaatgaacttaatttggggcggagggaagagtacgacgttctggacaaaaggaggggacgagatcccgagatgggcggaaagcctcagcgaaggaagaatccgcaagaggggctttataacgaactccagaaagataaaatggcagaagcctatagtgagattgggatgaagggagaaaggaggaggggtaaaggtcacgatgggttgtaccaaggattgagcacagccactaaagatacctatgatgcgctccacatgcaggccctgccgccaagacgcgccaagagaagcggatctggcgtgaagcagaccctgaatttcgacctgctgaagctggctggcgacgtggaatccaacccaggcccttctagaggccatatgaccgagtacaagcccacggtgcgcctcgccacccgcgacgacgtccccagggccgtacgcaccctcgccgccgcgttcgccgactaccccgccacgcgccacaccgtcgatccggaccgccacatcgagcgggtcaccgagctgcaagaactcttcctcacgcgcgtcgggctcgacatcggcaaggtgtgggtcgcggacgacggcgccgcggtggcggtctggaccacgccggagagcgtcgaagcgggggcggtgttcgccgagatcggcccgcgcatggccgagttgagcggttcccggctggccgcgcagcaacagatggaaggcctcctggcgccgcaccggcccaaggagcccgcgtggttcctggccaccgtcggcgtctcgcccgaccaccagggcaagggtctgggcagcgccgtcgtgctccccggagtggaggcggccgagcgcgccggggtgcccgccttcctggagacctccgcgccccgcaacctccccttctacgagcggctcggcttcaccgtcaccgccgacgtcgaggtgcccgaaggaccgcgcacctggtgcatgacccgcaagcccggtgcctga

SEQ ID NO: 9449 - DNA, 3150 bp, Artificial Sequence
  Synthetic Polynucleotide
atggccttaccagtgaccgccttgctcctgccgctggccttgctgctccacgccgccaggccgctggtggacatgaaagtgacccagatgcctcgctacctgattaagcggatgggcgagaacgtgctgctggaatgcggccaggatatgagccacgagacaatgtactggtacagacaggaccctggcctgggcctccagctgatctacatctcctacgacgtggacagcaacagcgagggcgacatccctaagggctacagagtgtcccggaagaagagagagcacttcagcctgatcctggacagcgccaagaccaaccagaccagcgtgtacttctgtgccagcagcagcaccaacaccgaggtgttctttggcaagggcaccagactgaccgtgctcctcgaggacctgaagaacgtgttcccacctgaggtggccgtgttcgagcctagcaaggccgagatcgcccacacccagaaagccaccctcgtgtgcctggctaccggcttctaccccgaccatgtggaactgtcttggtgggtcaacggcaaagaggtgcacagcggcgtgtgtaccgacccccagccactgaaagaacagcccgccctgaacgacagccggtactgcctgagcagcagactgagagtgtccgccaccttctggcagaacccccggaaccacttcagatgccaggtgcagttctacggcctgagcgagaacgacgagtggacccaggacagagccaagcccgtgacccagatcgtgtctgccgaagcctggggcagagccgattgcggatcccagagcttcggcctgctggaccccaagctgtgctacctgctggatggcatcctgttcatctacggcgtgatcctgaccgccctgttcctgagagtgaagttcagcagaagcgccgacgcccctgcctaccagcagggacagaaccaactgtacaacgagctgaacctgggcagacgggaagagtacgacgtgctggacaagcggagaggcagggaccctgagatgggcggaaagccccagcggagaaagaacccccaggaaggactgtataacgaactccagaaagacaagatggccgaagcctacagcgagatcggcatgaagggcgagcggagaagaggcaagggccacgatggcctgtaccagggcctgagcaccgccaccaaggacacctatgacgccctgcacatgcaggccctgcctccaagaagggccaagcgatctggatctggagcaacaaacttctcactactcaaacaagcaggtgacgtggaggagaatcccgggcctactagtatggactggatttggcgcatccttttccttgtcggcgctgctaccggcgcgcattccttcgaagacggcgatagcgtgacccagacagagggactcgtgacactgaccgaaggactgcccgtgatgctgaactgcacctaccagacaatctacagcaaccccttcctgttttggtacgtgcagcacctgaacgagagccccagactgctgctgaagtccttcaccgacaacaagcggacagagcaccagggctttcacgccacactgcacaagagcagctccagcttccatctgcaaaagtctagcgcccagctgagcgacagcgccctgtactactgtgccttcgacaccaacacctacaaagtgatcttcggcaagggcacccatctgcacgtgctgcctaatacgcgtatccagaaccctgatcctgccgtgtaccagctgcgggatagcaagagcagcgacaagagcgtgtgtctgttcaccgacttcgacagccagaccaacgtgtcccagagcaaggactccgacgtgtacatcaccgataagtgcgtgctggacatgcggagcatggacttcaagagcaactccgccgtggcctggtccaacaagtccgatttcgcctgcgccaacgccttcaacaacagcattatccccgaggacacattcttcccaagcagcgacgtgccctgcggtacccagagttttgggttgttggaccctaaattgtgctatctgttggacggaatcctgttcatttacggagtgatcctgaccgcattgttcctgcgggttaagttttccagatccgcagacgcacccgcttaccaacaagggcagaaccaactctacaatgaacttaatttggggcggagggaagagtacgacgttctggacaaaaggaggggacgagatcccgagatgggcggaaagcctcagcgaaggaagaatccgcaagaggggctttataacgaactccagaaagataaaatggcagaagcctatagtgagattgggatgaagggagaaaggaggaggggtaaaggtcacgatgggttgtaccaaggattgagcacagccactaaagatacctatgatgcgctccacatgcaggccctgccgccaagacgcgccaagagaagcggatctggcgtgaagcagaccctgaatttcgacctgctgaagctggctggcgacgtggaatccaacccaggcccttctagaggccatatgaccgagtacaagcccacggtgcgcctcgccacccgcgacgacgtccccagggccgtacgcaccctcgccgccgcgttcgccgactaccccgccacgcgccacaccgtcgatccggaccgccacatcgagcgggtcaccgagctgcaagaactcttcctcacgcgcgtcgggctcgacatcggcaaggtgtgggtcgcggacgacggcgccgcggtggcggtctggaccacgccggagagcgtcgaagcgggggcggtgttcgccgagatcggcccgcgcatggccgagttgagcggttcccggctggccgcgcagcaacagatggaaggcctcctggcgccgcaccggcccaaggagcccgcgtggttcctggccaccgtcggcgtctcgcccgaccaccagggcaagggtctgggcagcgccgtcgtgctccccggagtggaggcggccgagcgcgccggggtgcccgccttcctggagacctccgcgccccgcaacctccccttctacgagcggctcggcttcaccgtcaccgccgacgtcgaggtgcccgaaggaccgcgcacctggtgcatgacccgcaagcccggtgcctga

SEQ ID NO: 9450 - DNA, 2448 bp, Artificial Sequence
  Synthetic Polynucleotide
atggccttaccagtgaccgccttgctcctgccgctggccttgctgctccacgccgccaggccgctggtggacatgaaagtgacccagatgcctcgctacctgattaagcggatgggcgagaacgtgctgctggaatgcggccaggatatgagccacgagacaatgtactggtacagacaggaccctggcctgggcctccagctgatctacatctcctacgacgtggacagcaacagcgagggcgacatccctaagggctacagagtgtcccggaagaagagagagcacttcagcctgatcctggacagcgccaagaccaaccagaccagcgtgtacttctgtgccagcagcagcaccaacaccgaggtgttctttggcaagggcaccagactgaccgtgctcctcgaggacctgaagaacgtgttcccacctgaggtggccgtgttcgagcctagcgaggccgagatcagccacacccagaaagccaccctcgtgtgcctggctaccggcttctaccccgaccatgtggaactgtcttggtgggtcaacggcaaagaggtgcacagcggcgtgtgtaccgacccccagccactgaaagaacagcccgccctgaacgacagccggtactgcctgagcagcagactgagagtgtccgccaccttctggcagaacccccggaaccacttcagatgccaggtgcagttctacggcctgagcgagaacgacgagtggacccaggacagagccaagcccgtgacccagatcgtgtctgccgaagcctggggcagagccgattgcggatcccagagcttcggcctgctggaccccaagctgtgctacctgctggatggcatcctgttcatctacggcgtgatcctgaccgccctgttcctgagagtgaagttcagcagaagcgccgacgcccctgcctaccagcagggacagaaccaactgtacaacgagctgaacctgggcagacgggaagagtacgacgtgctggacaagcggagaggcagggaccctgagatgggcggaaagccccagcggagaaagaacccccaggaaggactgtataacgaactccagaaagacaagatggccgaagcctacagcgagatcggcatgaagggcgagcggagaagaggcaagggccacgatggcctgtaccagggcctgagcaccgccaccaaggacacctatgacgccctgcacatgcaggccctgcctccaagaagggccaagcgatctggatctggagcaacaaacttctcactactcaaacaagcaggtgacgtggaggagaatcccgggcctactagtatggactggatttggcgcatccttttccttgtcggcgctgctaccggcgcgcattccttcgaagacggcgatagcgtgacccagacagagggactcgtgacactgaccgaaggactgcccgtgatgctgaactgcacctaccagacaatctacagcaaccccttcctgttttggtacgtgcagcacctgaacgagagccccagactgctgctgaagtccttcaccgacaacaagcggacagagcaccagggctttcacgccacactgcacaagagcagctccagcttccatctgcaaaagtctagcgcccagctgagcgacagcgccctgtactactgtgccttcgacaccaacacctacaaagtgatcttcggcaagggcacccatctgcacgtgctgcctaatacgcgtatccagaaccctgatcctgccgtgtaccagctgcgggatagcaagagcagcgacaagagcgtgtgtctgttcaccgacttcgacagccagaccaacgtgtcccagagcaaggactccgacgtgtacatcaccgataagtgcgtgctggacatgcggagcatggacttcaagagcaactccgccgtggcctggtccaacaagtccgatttcgcctgcgccaacgccttcaacaacagcattatccccgaggacacattcttcccaagccccgagagcagctgcggtacccagagttttgggttgttggaccctaaattgtgctatctgttggacggaatcctgttcatttacggagtgatcctgaccgcattgttcctgcgggttaagttttccagatccgcagacgcacccgcttaccaacaagggcagaaccaactctacaatgaacttaatttggggcggagggaagagtacgacgttctggacaaaaggaggggacgagatcccgagatgggcggaaagcctcagcgaaggaagaatccgcaagaggggctttataacgaactccagaaagataaaatggcagaagcctatagtgagattgggatgaagggagaaaggaggaggggtaaaggtcacgatgggttgtaccaaggattgagcacagccactaaagatacctatgatgcgctccacatgcaggccctgccgccaaga

SEQ ID NO: 9451 - DNA, 2466 bp, Artificial Sequence
  Synthetic Polynucleotide
atggccttaccagtgaccgccttgctcctgccgctggccttgctgctccacgccgccaggccgctggtggacatgaaagtgacccagatgcctcgctacctgattaagcggatgggcgagaacgtgctgctggaatgcggccaggatatgagccacgagacaatgtactggtacagacaggaccctggcctgggcctccagctgatctacatctcctacgacgtggacagcaacagcgagggcgacatccctaagggctacagagtgtcccggaagaagagagagcacttcagcctgatcctggacagcgccaagaccaaccagaccagcgtgtacttctgtgccagcagcagcaccaacaccgaggtgttctttggcaagggcaccagactgaccgtgctcctcgagcagagcttcggcctgctggaccccaagctgtgctacctgctggatggcatcctgttcatctacggcgtgatcctgaccgccctgttcctgagagtgaagttcagcagaagcgccgacgcccctgcctaccagcagggacagaaccaactgtacaacgagctgaacctgggcagacgggaagagtacgacgtgctggacaagcggagaggcagggaccctgagatgggcggaaagccccagcggagaaagaacccccaggaaggactgtataacgaactccagaaagacaagatggccgaagcctacagcgagatcggcatgaagggcgagcggagaagaggcaagggccacgatggcctgtaccagggcctgagcaccgccaccaaggacacctatgacgccctgcacatgcaggccctgcctccaagaagggccaagcgatctggatctggagcaacaaacttctcactactcaaacaagcaggtgacgtggaggagaatcccgggcctactagtatggactggatttggcgcatccttttccttgtcggcgctgctaccggcgcgcattccttcgaagacggcgatagcgtgacccagacagagggactcgtgacactgaccgaaggactgcccgtgatgctgaactgcacctaccagacaatctacagcaaccccttcctgttttggtacgtgcagcacctgaacgagagccccagactgctgctgaagtccttcaccgacaacaagcggacagagcaccagggctttcacgccacactgcacaagagcagctccagcttccatctgcaaaagtctagcgcccagctgagcgacagcgccctgtactactgtgccttcgacaccaacacctacaaagtgatcttcggcaagggcacccatctgcacgtgctgcctaatacgcgtcagagttttgggttgttggaccctaaattgtgctatctgttggacggaatcctgttcatttacggagtgatcctgaccgcattgttcctgcgggttaagttttccagatccgcagacgcacccgcttaccaacaagggcagaaccaactctacaatgaacttaatttggggcggagggaagagtacgacgttctggacaaaaggaggggacgagatcccgagatgggcggaaagcctcagcgaaggaagaatccgcaagaggggctttataacgaactccagaaagataaaatggcagaagcctatagtgagattgggatgaagggagaaaggaggaggggtaaaggtcacgatgggttgtaccaaggattgagcacagccactaaagatacctatgatgcgctccacatgcaggccctgccgccaagacgcgccaagagaagcggatctggcgtgaagcagaccctgaatttcgacctgctgaagctggctggcgacgtggaatccaacccaggcccttctagaggccatatgaccgagtacaagcccacggtgcgcctcgccacccgcgacgacgtccccagggccgtacgcaccctcgccgccgcgttcgccgactaccccgccacgcgccacaccgtcgatccggaccgccacatcgagcgggtcaccgagctgcaagaactcttcctcacgcgcgtcgggctcgacatcggcaaggtgtgggtcgcggacgacggcgccgcggtggcggtctggaccacgccggagagcgtcgaagcgggggcggtgttcgccgagatcggcccgcgcatggccgagttgagcggttcccggctggccgcgcagcaacagatggaaggcctcctggcgccgcaccggcccaaggagcccgcgtggttcctggccaccgtcggcgtctcgcccgaccaccagggcaagggtctgggcagcgccgtcgtgctccccggagtggaggcggccgagcgcgccggggtgcccgccttcctggagacctccgcgccccgcaacctccccttctacgagcggctcggcttcaccgtcaccgccgacgtcgaggtgcccgaaggaccgcgcacctggtgcatgacccgcaagcccggtgcctga

SEQ ID NO: 9452 - DNA, 2571 bp, Artificial Sequence
  Synthetic Polynucleotide
atggccttaccagtgaccgccttgctcctgccgctggccttgctgctccacgccgccaggccgctggtggacatgaaagtgacccagatgcctcgctacctgattaagcggatgggcgagaacgtgctgctggaatgcggccaggatatgagccacgagacaatgtactggtacagacaggaccctggcctgggcctccagctgatctacatctcctacgacgtggacagcaacagcgagggcgacatccctaagggctacagagtgtcccggaagaagagagagcacttcagcctgatcctggacagcgccaagaccaaccagaccagcgtgtacttctgtgccagcagcagcaccaacaccgaggtgttctttggcaagggcaccagactgaccgtgctcctcgaggacctgaagaacgtgttcccacctgaggtggccgtgttcgagcctagcgaggccgagatcagccacacccagaaagccaccctcgtgtgcctggctaccggcttctaccccgaccatgtggaactgtcttggtgggtcaacggcaaagaggtgcacagcggcgtgtgtaccgacccccagccactgaaagaacagcccgccctgaacgacagccggtactgcctgagcagcagactgagagtgtccgccaccttctggcagaacccccggaaccacttcagatgccaggtgcagttctacggcctgagcgagaacgacgagtggacccaggacagagccaagcccgtgacccagatcgtgtctgccgaagcctggggcagagccgattgcggatcccagagcttcggcctgctggaccccaagctgtgctacctgctggatggcatcctgttcatctacggcgtgatcctgaccgccctgttcctgaggagtaagaggagcaggctcctgcacagtgactacatgaacatgactccacgccgccccggacccacccgcaagcattaccagccctatgccccaccacgcgacttcgcagcctatcgctccagagtgaagttcagcagaagcgccgacgcccctgcctaccagcagggacagaaccaactgtacaacgagctgaacctgggcagacgggaagagtacgacgtgctggacaagcggagaggcagggaccctgagatgggcggaaagccccagcggagaaagaacccccaggaaggactgtataacgaactccagaaagacaagatggccgaagcctacagcgagatcggcatgaagggcgagcggagaagaggcaagggccacgatggcctgtaccagggcctgagcaccgccaccaaggacacctatgacgccctgcacatgcaggccctgcctccaagaagggccaagcgatctggatctggagcaacaaacttctcactactcaaacaagcaggtgacgtggaggagaatcccgggcctactagtatggactggatttggcgcatccttttccttgtcggcgctgctaccggcgcgcattccttcgaagacggcgatagcgtgacccagacagagggactcgtgacactgaccgaaggactgcccgtgatgctgaactgcacctaccagacaatctacagcaaccccttcctgttttggtacgtgcagcacctgaacgagagccccagactgctgctgaagtccttcaccgacaacaagcggacagagcaccagggctttcacgccacactgcacaagagcagctccagcttccatctgcaaaagtctagcgcccagctgagcgacagcgccctgtactactgtgccttcgacaccaacacctacaaagtgatcttcggcaagggcacccatctgcacgtgctgcctaatacgcgtatccagaaccctgatcctgccgtgtaccagctgcgggatagcaagagcagcgacaagagcgtgtgtctgttcaccgacttcgacagccagaccaacgtgtcccagagcaaggactccgacgtgtacatcaccgataagtgcgtgctggacatgcggagcatggacttcaagagcaactccgccgtggcctggtccaacaagtccgatttcgcctgcgccaacgccttcaacaacagcattatccccgaggacacattcttcccaagccccgagagcagctgcggtacccagagttttgggttgttggaccctaaattgtgctatctgttggacggaatcctgttcatttacggagtgatcctgaccgcattgttcctgcgggttaagttttccagatccgcagacgcacccgcttaccaacaagggcagaaccaactctacaatgaacttaatttggggcggagggaagagtacgacgttctggacaaaaggaggggacgagatcccgagatgggcggaaagcctcagcgaaggaagaatccgcaagaggggctttataacgaactccagaaagataaaatggcagaagcctatagtgagattgggatgaagggagaaaggaggaggggtaaaggtcacgatgggttgtaccaaggattgagcacagccactaaagatacctatgatgcgctccacatgcaggccctgccgccaaga

SEQ ID NO: 9453 - DNA, 2694 bp, Artificial Sequence
  Synthetic Polynucleotide
atggccttaccagtgaccgccttgctcctgccgctggccttgctgctccacgccgccaggccgctggtggacatgaaagtgacccagatgcctcgctacctgattaagcggatgggcgagaacgtgctgctggaatgcggccaggatatgagccacgagacaatgtactggtacagacaggaccctggcctgggcctccagctgatctacatctcctacgacgtggacagcaacagcgagggcgacatccctaagggctacagagtgtcccggaagaagagagagcacttcagcctgatcctggacagcgccaagaccaaccagaccagcgtgtacttctgtgccagcagcagcaccaacaccgaggtgttctttggcaagggcaccagactgaccgtgctcctcgaggacctgaagaacgtgttcccacctgaggtggccgtgttcgagcctagcgaggccgagatcagccacacccagaaagccaccctcgtgtgcctggctaccggcttctaccccgaccatgtggaactgtcttggtgggtcaacggcaaagaggtgcacagcggcgtgtgtaccgacccccagccactgaaagaacagcccgccctgaacgacagccggtactgcctgagcagcagactgagagtgtccgccaccttctggcagaacccccggaaccacttcagatgccaggtgcagttctacggcctgagcgagaacgacgagtggacccaggacagagccaagcccgtgacccagatcgtgtctgccgaagcctggggcagagccgattgcggatcccagagcttcggcctgctggaccccaagctgtgctacctgctggatggcatcctgttcatctacggcgtgatcctgaccgccctgttcctgaggagtaagaggagcaggctcctgcacagtgactacatgaacatgactccacgccgccccggacccacccgcaagcattaccagccctatgccccaccacgcgacttcgcagcctatcgctccagagtgaagttcagcagaagcgccgacgcccctgcctaccagcagggacagaaccaactgtacaacgagctgaacctgggcagacgggaagagtacgacgtgctggacaagcggagaggcagggaccctgagatgggcggaaagccccagcggagaaagaacccccaggaaggactgtataacgaactccagaaagacaagatggccgaagcctacagcgagatcggcatgaagggcgagcggagaagaggcaagggccacgatggcctgtaccagggcctgagcaccgccaccaaggacacctatgacgccctgcacatgcaggccctgcctccaagaagggccaagcgatctggatctggagcaacaaacttctcactactcaaacaagcaggtgacgtggaggagaatcccgggcctactagtatggactggatttggcgcatccttttccttgtcggcgctgctaccggcgcgcattccttcgaagacggcgatagcgtgacccagacagagggactcgtgacactgaccgaaggactgcccgtgatgctgaactgcacctaccagacaatctacagcaaccccttcctgttttggtacgtgcagcacctgaacgagagccccagactgctgctgaagtccttcaccgacaacaagcggacagagcaccagggctttcacgccacactgcacaagagcagctccagcttccatctgcaaaagtctagcgcccagctgagcgacagcgccctgtactactgtgccttcgacaccaacacctacaaagtgatcttcggcaagggcacccatctgcacgtgctgcctaatacgcgtatccagaaccctgatcctgccgtgtaccagctgcgggatagcaagagcagcgacaagagcgtgtgtctgttcaccgacttcgacagccagaccaacgtgtcccagagcaaggactccgacgtgtacatcaccgataagtgcgtgctggacatgcggagcatggacttcaagagcaactccgccgtggcctggtccaacaagtccgatttcgcctgcgccaacgccttcaacaacagcattatccccgaggacacattcttcccaagccccgagagcagctgcggtacccagagttttgggttgttggaccctaaattgtgctatctgttggacggaatcctgttcatttacggagtgatcctgaccgcattgttcctgaggagcaagcggtcacggctgctccacagcgattacatgaatatgacaccacgaagaccgggtcctactcgcaaacactaccaaccctacgcacctccccgcgactttgcagcgtaccgatctcgggttaagttttccagatccgcagacgcacccgcttaccaacaagggcagaaccaactctacaatgaacttaatttggggcggagggaagagtacgacgttctggacaaaaggaggggacgagatcccgagatgggcggaaagcctcagcgaaggaagaatccgcaagaggggctttataacgaactccagaaagataaaatggcagaagcctatagtgagattgggatgaagggagaaaggaggaggggtaaaggtcacgatgggttgtaccaaggattgagcacagccactaaagatacctatgatgcgctccacatgcaggccctgccgccaaga

SEQ ID NO: 9454 - DNA, 2448 bp, Artificial Sequence
  Synthetic Polynucleotide
atggccttaccagtgaccgccttgctcctgccgctggccttgctgctccacgccgccaggccgctggtggacatgaaagtgacccagatgcctcgctacctgattaagcggatgggcgagaacgtgctgctggaatgcggccaggatatgagccacgagacaatgtactggtacagacaggaccctggcctgggcctccagctgatctacatctcctacgacgtggacagcaacagcgagggcgacatccctaagggctacagagtgtcccggaagaagagagagcacttcagcctgatcctggacagcgccaagaccaaccagaccagcgtgtacttctgtgccagcagcagcaccaacaccgaggtgttctttggcaagggcaccagactgaccgtgctcctcgaggacctgaagaacgtgttcccacctgaggtggccgtgttcgagcctagcgaggccgagatcagccacacccagaaagccaccctcgtgtgcctggctaccggcttctaccccgaccatgtggaactgtcttggtgggtcaacggcaaagaggtgcacagcggcgtgtctaccgacccccagccactgaaagaacagcccgccctgaacgacagccggtactgcctgagcagcagactgagagtgtccgccaccttctggcagaacccccggaaccacttcagatgccaggtgcagttctacggcctgagcgagaacgacgagtggacccaggacagagccaagcccgtgacccagatcgtgtctgccgaagcctggggcagagccgattgcggatcccagagcttcggcctgctggaccccaagctgtgctacctgctggatggcatcctgttcatctacggcgtgatcctgaccgccctgttcctgagagtgaagttcagcagaagcgccgacgcccctgcctaccagcagggacagaaccaactgtacaacgagctgaacctgggcagacgggaagagtacgacgtgctggacaagcggagaggcagggaccctgagatgggcggaaagccccagcggagaaagaacccccaggaaggactgtataacgaactccagaaagacaagatggccgaagcctacagcgagatcggcatgaagggcgagcggagaagaggcaagggccacgatggcctgtaccagggcctgagcaccgccaccaaggacacctatgacgccctgcacatgcaggccctgcctccaagaagggccaagcgatctggatctggagcaacaaacttctcactactcaaacaagcaggtgacgtggaggagaatcccgggcctactagtatggactggatttggcgcatccttttccttgtcggcgctgctaccggcgcgcattccttcgaagacggcgatagcgtgacccagacagagggactcgtgacactgaccgaaggactgcccgtgatgctgaactgcacctaccagacaatctacagcaaccccttcctgttttggtacgtgcagcacctgaacgagagccccagactgctgctgaagtccttcaccgacaacaagcggacagagcaccagggctttcacgccacactgcacaagagcagctccagcttccatctgcaaaagtctagcgcccagctgagcgacagcgccctgtactactgtgccttcgacaccaacacctacaaagtgatcttcggcaagggcacccatctgcacgtgctgcctaatacgcgtatccagaaccctgatcctgccgtgtaccagctgcgggatagcaagagcagcgacaagagcgtgtgtctgttcaccgacttcgacagccagaccaacgtgtcccagagcaaggactccgacgtgtacatcaccgataagaccgtgctggacatgcggagcatggacttcaagagcaactccgccgtggcctggtccaacaagtccgatttcgcctgcgccaacgccttcaacaacagcattatccccgaggacacattcttcccaagccccgagagcagctgcggtacccagagttttgggttgttggaccctaaattgtgctatctgttggacggaatcctgttcatttacggagtgatcctgaccgcattgttcctgcgggttaagttttccagatccgcagacgcacccgcttaccaacaagggcagaaccaactctacaatgaacttaatttggggcggagggaagagtacgacgttctggacaaaaggaggggacgagatcccgagatgggcggaaagcctcagcgaaggaagaatccgcaagaggggctttataacgaactccagaaagataaaatggcagaagcctatagtgagattgggatgaagggagaaaggaggaggggtaaaggtcacgatgggttgtaccaaggattgagcacagccactaaagatacctatgatgcgctccacatgcaggccctgccgccaaga

SEQ ID NO: 9455 - DNA, 3075 bp, Artificial Sequence
  Synthetic Polynucleotide
atggccttaccagtgaccgccttgctcctgccgctggccttgctgctccacgccgccaggccgctggtggacatgaaagtgacccagatgcctcgctacctgattaagcggatgggcgagaacgtgctgctggaatgcggccaggatatgagccacgagacaatgtactggtacagacaggaccctggcctgggcctccagctgatctacatctcctacgacgtggacagcaacagcgagggcgacatccctaagggctacagagtgtcccggaagaagagagagcacttcagcctgatcctggacagcgccaagaccaaccagaccagcgtgtacttctgtgccagcagcagcaccaacaccgaggtgttctttggcaagggcaccagactgaccgtgctcctcgaggacaagcagctggacgccgacgtgtcccccaagcctaccatcttcctgccctctatcgccgagacaaagctccagaaggccggcacctacctgtgcctgctggaaaagttcttcccagatgtgattaagatccactggcaggaaaagaagtccaacaccatcctgggcagccaggaaggcaacaccatgaagaccaacgacacctacatgaagttcagctggctgaccgtgcccgagaagtccctggacaaagaacacagatgcatcgtgcggcacgaaaacaacaagaacggcgtggaccaggaaatcatcttcccacccatcaagaccgatgtgattacaggatcccagagcttcggcctgctggaccccaagctgtgctacctgctggatggcatcctgttcatctacggcgtgatcctgaccgccctgttcctgagagtgaagttcagcagaagcgccgacgcccctgcctaccagcagggacagaaccaactgtacaacgagctgaacctgggcagacgggaagagtacgacgtgctggacaagcggagaggcagggaccctgagatgggcggaaagccccagcggagaaagaacccccaggaaggactgtataacgaactccagaaagacaagatggccgaagcctacagcgagatcggcatgaagggcgagcggagaagaggcaagggccacgatggcctgtaccagggcctgagcaccgccaccaaggacacctatgacgccctgcacatgcaggccctgcctccaagaagggccaagcgatctggatctggagcaacaaacttctcactactcaaacaagcaggtgacgtggaggagaatcccgggcctactagtatggactggatttggcgcatccttttccttgtcggcgctgctaccggcgcgcattccttcgaagacggcgatagcgtgacccagacagagggactcgtgacactgaccgaaggactgcccgtgatgctgaactgcacctaccagacaatctacagcaaccccttcctgttttggtacgtgcagcacctgaacgagagccccagactgctgctgaagtccttcaccgacaacaagcggacagagcaccagggctttcacgccacactgcacaagagcagctccagcttccatctgcaaaagtctagcgcccagctgagcgacagcgccctgtactactgtgccttcgacaccaacacctacaaagtgatcttcggcaagggcacccatctgcacgtgctgcctaatacgcgtagccagcctcacaccaagcccagcgtgttcgtgatgaagaacggcaccaacgtggcctgcctcgtgaaagagttctaccccaaggacatcaggatcaacctggtgtccagcaagaagatcaccgagttcgaccccgccatcgtgatctcccccagcggcaagtacaacgccgtgaagctggggaagtacgaggacagcaacagcgtgacctgctccgtgcagcacgacaacaagaccgtgcacagcaccgactttggtacccagagttttgggttgttggaccctaaattgtgctatctgttggacggaatcctgttcatttacggagtgatcctgaccgcattgttcctgcgggttaagttttccagatccgcagacgcacccgcttaccaacaagggcagaaccaactctacaatgaacttaatttggggcggagggaagagtacgacgttctggacaaaaggaggggacgagatcccgagatgggcggaaagcctcagcgaaggaagaatccgcaagaggggctttataacgaactccagaaagataaaatggcagaagcctatagtgagattgggatgaagggagaaaggaggaggggtaaaggtcacgatgggttgtaccaaggattgagcacagccactaaagatacctatgatgcgctccacatgcaggccctgccgccaagacgcgccaagagaagcggatctggcgtgaagcagaccctgaatttcgacctgctgaagctggctggcgacgtggaatccaacccaggcccttctagaggccatatgaccgagtacaagcccacggtgcgcctcgccacccgcgacgacgtccccagggccgtacgcaccctcgccgccgcgttcgccgactaccccgccacgcgccacaccgtcgatccggaccgccacatcgagcgggtcaccgagctgcaagaactcttcctcacgcgcgtcgggctcgacatcggcaaggtgtgggtcgcggacgacggcgccgcggtggcggtctggaccacgccggagagcgtcgaagcgggggcggtgttcgccgagatcggcccgcgcatggccgagttgagcggttcccggctggccgcgcagcaacagatggaaggcctcctggcgccgcaccggcccaaggagcccgcgtggttcctggccaccgtcggcgtctcgcccgaccaccagggcaagggtctgggcagcgccgtcgtgctccccggagtggaggcggccgagcgcgccggggtgcccgccttcctggagacctccgcgccccgcaacctccccttctacgagcggctcggcttcaccgtcaccgccgacgtcgaggtgcccgaaggaccgcgcacctggtgcatgacccgcaagcccggtgcctga

SEQ ID NO: 9456 - DNA, 2685 bp, Artificial Sequence
  Synthetic Polynucleotide
atggccttaccagtgaccgccttgctcctgccgctggccttgctgctccacgccgccaggccgctggtggacatgaaagtgacccagatgcctcgctacctgattaagcggatgggcgagaacgtgctgctggaatgcggccaggatatgagccacgagacaatgtactggtacagacaggaccctggcctgggcctccagctgatctacatctcctacgacgtggacagcaacagcgagggcgacatccctaagggctacagagtgtcccggaagaagagagagcacttcagcctgatcctggacagcgccaagaccaaccagaccagcgtgtacttctgtgccagcagcagcaccaacaccgaggtgttctttggcaagggcaccagactgaccgtgctcctcgagggacagcctaaggccaatcctaccgtgacactgttccctccaagcagcgaagaactccaggccaacaaggccacacttgtgtgcctgatctccgacttctaccctggggctgtgacagtggcttggaaggccgatggatctcctgtgaaagccggcgtggaaaccaccaagccatccaagcagagcaacaacaaatacgccgccagctcctacctgagcctgacacctgagcagtggaagtcccacagatcctacagctgccaagtgacccacgaaggcagcaccgtggaaaagacagtggcccctacagagtgcagcacaacacctggcgagagaagtagcctgcctgccttctatcctggcaccagcggctcttgttctggctgtggatctctgagcctgcctctgctggctggactggttgctgctgatgctgtggcctctctgctgattgtgggagccgtgttcctgtgcgccagacctagaagaagccccgctcaagaggacggcaaggtgtacatcaacatgcccggcagaggaagggccaagcgatctggatctggagcaacaaacttctcactactcaaacaagcaggtgacgtggaggagaatcccgggcctactagtatggactggatttggcgcatccttttccttgtcggcgctgctaccggcgcgcattccttcgaagacggcgatagcgtgacccagacagagggactcgtgacactgaccgaaggactgcccgtgatgctgaactgcacctaccagacaatctacagcaaccccttcctgttttggtacgtgcagcacctgaacgagagccccagactgctgctgaagtccttcaccgacaacaagcggacagagcaccagggctttcacgccacactgcacaagagcagctccagcttccatctgcaaaagtctagcgcccagctgagcgacagcgccctgtactactgtgccttcgacaccaacacctacaaagtgatcttcggcaagggcacccatctgcacgtgctgcctaatacgcgtgcctctacaaagggaccctccgtgtttcctctggctcccagcagcaagtctacaagcggaggaacagccgctctgggctgcctggtcaaggattactttcccgagcctgtgaccgtgtcctggaatagcggagcactgacaagcggcgtgcacacctttccagccgtgctgcaaagcagcggcctgtactctctgagcagcgtggtcacagtgcctagctctagcctgggcacccagacctacatctgcaatgtgaaccacaagcctagcaacaccaaggtggacaagagagtggaacccaagagctgtacaacgccgggcgaaaggagttccttgccggccttttaccccggcacaagcggaagctgtagtgggtgtggaagcctcagcctcccacttcttgcgggcctcgtcgcggcagatgcagtagcttcacttcttattgtaggcgcggtatttctctgtgctcgaccaaggaggtcacccgctcaggaggatggtaaggtgtatataaatatgccaggacgcggacgcgccaagagaagcggatctggcgtgaagcagaccctgaatttcgacctgctgaagctggctggcgacgtggaatccaacccaggcccttctagaggccatatgaccgagtacaagcccacggtgcgcctcgccacccgcgacgacgtccccagggccgtacgcaccctcgccgccgcgttcgccgactaccccgccacgcgccacaccgtcgatccggaccgccacatcgagcgggtcaccgagctgcaagaactcttcctcacgcgcgtcgggctcgacatcggcaaggtgtgggtcgcggacgacggcgccgcggtggcggtctggaccacgccggagagcgtcgaagcgggggcggtgttcgccgagatcggcccgcgcatggccgagttgagcggttcccggctggccgcgcagcaacagatggaaggcctcctggcgccgcaccggcccaaggagcccgcgtggttcctggccaccgtcggcgtctcgcccgaccaccagggcaagggtctgggcagcgccgtcgtgctccccggagtggaggcggccgagcgcgccggggtgcccgccttcctggagacctccgcgccccgcaacctccccttctacgagcggctcggcttcaccgtcaccgccgacgtcgaggtgcccgaaggaccgcgcacctggtgcatgacccgcaagcccggtgcctgagtcgac

SEQ ID NO: 9457 - DNA, 2166 bp, Artificial Sequence
  Synthetic Polynucleotide
atggccttaccagtgaccgccttgctcctgccgctggccttgctgctccacgccgccaggccgctggtggacatgaaagtgacccagatgcctcgctacctgattaagcggatgggcgagaacgtgctgctggaatgcggccaggatatgagccacgagacaatgtactggtacagacaggaccctggcctgggcctccagctgatctacatctcctacgacgtggacagcaacagcgagggcgacatccctaagggctacagagtgtcccggaagaagagagagcacttcagcctgatcctggacagcgccaagaccaaccagaccagcgtgtacttctgtgccagcagcagcaccaacaccgaggtgttctttggcaagggcaccagactgaccgtgctcctcgagggcgacatcgagaacaccagtctggcccctgaggaccctacctttcctgccgatacctggggcacctacctgctgaccacagagacaggactccagaaagatcacgccctgtgggaccacacagcccagaacctgctgagaatgggcctcgcctttctggtgctggttgccctcgtgtggttcctggtggaagattggctgagccggaagcggacaagagagagagccagcagagcctctacctgggagggaagaagaaggctgaacacccagacacttagggccaagcgatctggatctggagcaacaaacttctcactactcaaacaagcaggtgacgtggaggagaatcccgggcctactagtatggactggatttggcgcatccttttccttgtcggcgctgctaccggcgcgcattccttcgaagacggcgatagcgtgacccagacagagggactcgtgacactgaccgaaggactgcccgtgatgctgaactgcacctaccagacaatctacagcaaccccttcctgttttggtacgtgcagcacctgaacgagagccccagactgctgctgaagtccttcaccgacaacaagcggacagagcaccagggctttcacgccacactgcacaagagcagctccagcttccatctgcaaaagtctagcgcccagctgagcgacagcgccctgtactactgtgccttcgacaccaacacctacaaagtgatcttcggcaagggcacccatctgcacgtgctgcctaatacgcgtggcgatattgagaatacctctctggccccagaagatcctacattccccgccgacacatggggaacatatctgctgacaaccgaaaccgggctgcaaaaggaccatgctctgtgggatcataccgctcagaatctgcttcggatggggcttgcattcctggtcctggtggctcttgtctggtttctggtcgaggactggctgtcccggaagagaaccagagaaagagcttccagggccagcacctgggaaggcagacgcagactgaatactcagaccctgcgcgccaagagaagcggatctggcgtgaagcagaccctgaatttcgacctgctgaagctggctggcgacgtggaatccaacccaggcccttctagaggccatatgaccgagtacaagcccacggtgcgcctcgccacccgcgacgacgtccccagggccgtacgcaccctcgccgccgcgttcgccgactaccccgccacgcgccacaccgtcgatccggaccgccacatcgagcgggtcaccgagctgcaagaactcttcctcacgcgcgtcgggctcgacatcggcaaggtgtgggtcgcggacgacggcgccgcggtggcggtctggaccacgccggagagcgtcgaagcgggggcggtgttcgccgagatcggcccgcgcatggccgagttgagcggttcccggctggccgcgcagcaacagatggaaggcctcctggcgccgcaccggcccaaggagcccgcgtggttcctggccaccgtcggcgtctcgcccgaccaccagggcaagggtctgggcagcgccgtcgtgctccccggagtggaggcggccgagcgcgccggggtgcccgccttcctggagacctccgcgccccgcaacctccccttctacgagcggctcggcttcaccgtcaccgccgacgtcgaggtgcccgaaggaccgcgcacctggtgcatgacccgcaagcccggtgcctga

SEQ ID NO: 9458 - DNA, 1998 bp, Artificial Sequence
  Synthetic Polynucleotide
atggccttaccagtgaccgccttgctcctgccgctggccttgctgctccacgccgccaggccgctggtggacatgaaagtgacccagatgcctcgctacctgattaagcggatgggcgagaacgtgctgctggaatgcggccaggatatgagccacgagacaatgtactggtacagacaggaccctggcctgggcctccagctgatctacatctcctacgacgtggacagcaacagcgagggcgacatccctaagggctacagagtgtcccggaagaagagagagcacttcagcctgatcctggacagcgccaagaccaaccagaccagcgtgtacttctgtgccagcagcagcaccaacaccgaggtgttctttggcaagggcaccagactgaccgtgctcctcgagatcactcaaggtttggcagtgtcaaccatctcatcattctttccacctggctaccaagtgtccttctgcctggtcatggtgctgctgttcgccgtggataccggcctgtacttcagcgtcaagaccaacatccggtccagcaccagagactggaaggaccacaagttcaagtggcggaaggaccctcaggacaagagggccaagcgatctggatctggagcaacaaacttctcactactcaaacaagcaggtgacgtggaggagaatcccgggcctactagtatggactggatttggcgcatccttttccttgtcggcgctgctaccggcgcgcattccttcgaagacggcgatagcgtgacccagacagagggactcgtgacactgaccgaaggactgcccgtgatgctgaactgcacctaccagacaatctacagcaaccccttcctgttttggtacgtgcagcacctgaacgagagccccagactgctgctgaagtccttcaccgacaacaagcggacagagcaccagggctttcacgccacactgcacaagagcagctccagcttccatctgcaaaagtctagcgcccagctgagcgacagcgccctgtactactgtgccttcgacaccaacacctacaaagtgatcttcggcaagggcacccatctgcacgtgctgcctaatacgcgtatcacccagggcctggccgtgtctaccatcagcagctttttcccacccggctaccaggtgtccttctgcctcgtgatggtgctgctgttcgccgtggacaccggcctgtacttcagcgtgaaaacaaacatccggtccagcaccagagactggaaggaccacaagttcaagtggcggaaggacccccaggacaagcgcgccaagagaagcggatctggcgtgaagcagaccctgaatttcgacctgctgaagctggctggcgacgtggaatccaacccaggcccttctagaggccatatgaccgagtacaagcccacggtgcgcctcgccacccgcgacgacgtccccagggccgtacgcaccctcgccgccgcgttcgccgactaccccgccacgcgccacaccgtcgatccggaccgccacatcgagcgggtcaccgagctgcaagaactcttcctcacgcgcgtcgggctcgacatcggcaaggtgtgggtcgcggacgacggcgccgcggtggcggtctggaccacgccggagagcgtcgaagcgggggcggtgttcgccgagatcggcccgcgcatggccgagttgagcggttcccggctggccgcgcagcaacagatggaaggcctcctggcgccgcaccggcccaaggagcccgcgtggttcctggccaccgtcggcgtctcgcccgaccaccagggcaagggtctgggcagcgccgtcgtgctccccggagtggaggcggccgagcgcgccggggtgcccgccttcctggagacctccgcgccccgcaacctccccttctacgagcggctcggcttcaccgtcaccgccgacgtcgaggtgcccgaaggaccgcgcacctggtgcatgacccgcaagcccggtgcctga

SEQ ID NO: 9459 - DNA, 2706 bp, Artificial Sequence
  Synthetic Polynucleotide
atggccttaccagtgaccgccttgctcctgccgctggccttgctgctccacgccgccaggccgctggtggacatgaaagtgacccagatgcctcgctacctgattaagcggatgggcgagaacgtgctgctggaatgcggccaggatatgagccacgagacaatgtactggtacagacaggaccctggcctgggcctccagctgatctacatctcctacgacgtggacagcaacagcgagggcgacatccctaagggctacagagtgtcccggaagaagagagagcacttcagcctgatcctggacagcgccaagaccaaccagaccagcgtgtacttctgtgccagcagcagcaccaacaccgaggtgttctttggcaagggcaccagactgaccgtgctcctcgagctgtgggtttcacagcctccagagatcagaaccctggaaggcagcagcgccttcctgccttgcagcttcaatgcctctcagggcagactggctatcggcagcgtgacctggttcagagatgaggtggtgcccggcaaagaagtgcggaacggcacccctgagtttagaggaaggctggcccctctggcctccagcagatttctgcacgatcaccaggccgagctgcacatcagagatgtgcgaggacacgacgccagcatctacgtgtgcagagtggaagtgctcggcctcggagttggcacaggcaatggaacaagactggtggtggaaaaagagcaccctcagctcggagccggaacagtgctgcttctgagagccggcttttacgccgtgtcctttctgtctgtggccgtgggcagcaccgtgtactatcagggcaagtgcctgacctggaagggacctagaaggcaactgcctgctgtggtgcctgctcctttgcctcctccatgtggaagctctgcccatctgctgccacctgttccaggcggaagggccaagcgatctggatctggagcaacaaacttctcactactcaaacaagcaggtgacgtggaggagaatcccgggcctactagtatggactggatttggcgcatccttttccttgtcggcgctgctaccggcgcgcattccttcgaagacggcgatagcgtgacccagacagagggactcgtgacactgaccgaaggactgcccgtgatgctgaactgcacctaccagacaatctacagcaaccccttcctgttttggtacgtgcagcacctgaacgagagccccagactgctgctgaagtccttcaccgacaacaagcggacagagcaccagggctttcacgccacactgcacaagagcagctccagcttccatctgcaaaagtctagcgcccagctgagcgacagcgccctgtactactgtgccttcgacaccaacacctacaaagtgatcttcggcaagggcacccatctgcacgtgctgcctaatacgcgtctgtgggtgtcccagccacctgaaattcggacactggaaggctcctccgcctttctgccctgtagctttaacgccagccaggggagactcgccatcggctctgtgacatggttccgggatgaagtcgtccctggaaaagaagttcgcaacggaacaccagagttcagaggcagactcgccccactggcaagctccagattcctgcatgaccatcaggctgaactgcacattagggacgtgcggggccacgatgcctccatctatgtgtgtcgggtcgaagtgcttggactcggcgtcggaactggaaacggcactaggctggtggtcgagaaagaacatccacagcttggcgctggcaccgtcctgttgcttagagccggattctatgccgtcagcttcctgtccgtggctgtggggtctacagtgtattaccagggaaaatgtctcacctggaaaggccccagacgccagcttccagctgttgttcctgctccactgccaccaccttgtggctcctctgctcacttgcttccaccagtgcctggcggacgcgccaagagaagcggatctggcgtgaagcagaccctgaatttcgacctgctgaagctggctggcgacgtggaatccaacccaggcccttctagaggccatatgaccgagtacaagcccacggtgcgcctcgccacccgcgacgacgtccccagggccgtacgcaccctcgccgccgcgttcgccgactaccccgccacgcgccacaccgtcgatccggaccgccacatcgagcgggtcaccgagctgcaagaactcttcctcacgcgcgtcgggctcgacatcggcaaggtgtgggtcgcggacgacggcgccgcggtggcggtctggaccacgccggagagcgtcgaagcgggggcggtgttcgccgagatcggcccgcgcatggccgagttgagcggttcccggctggccgcgcagcaacagatggaaggcctcctggcgccgcaccggcccaaggagcccgcgtggttcctggccaccgtcggcgtctcgcccgaccaccagggcaagggtctgggcagcgccgtcgtgctccccggagtggaggcggccgagcgcgccggggtgcccgccttcctggagacctccgcgccccgcaacctccccttctacgagcggctcggcttcaccgtcaccgccgacgtcgaggtgcccgaaggaccgcgcacctggtgcatgacccgcaagcccggtgcctga

SEQ ID NO: 9460 - DNA, 2706 bp, Artificial Sequence; identical to SEQ ID NO: 9459
  Synthetic Polynucleotide

SEQ ID NO: 9461 - DNA, 2391 bp, Artificial Sequence
  Synthetic Polynucleotide
atggccttaccagtgaccgccttgctcctgccgctggccttgctgctccacgccgccaggccgctggtggacatgaaagtgacccagatgcctcgctacctgattaagcggatgggcgagaacgtgctgctggaatgcggccaggatatgagccacgagacaatgtactggtacagacaggaccctggcctgggcctccagctgatctacatctcctacgacgtggacagcaacagcgagggcgacatccctaagggctacagagtgtcccggaagaagagagagcacttcagcctgatcctggacagcgccaagaccaaccagaccagcgtgtacttctgtgccagcagcagcaccaacaccgaggtgttctttggcaagggcaccagactgaccgtgctcggacagcctaaggccaatcctaccgtgacactgttccctccaagcagcgaagaactccaggccaacaaggccacacttgtgtgcctgatctccgacttctaccctggggctgtgacagtggcttggaaggccgatggatctcctgtgaaagccggcgtggaaaccaccaagccatccaagcagagcaacaacaaatacgccgccagctcctacctgagcctgacacctgagcagtggaagtcccacagatcctacagctgccaagtgacccacgaaggcagcaccgtggaaaagacagtggcccctacagagtgcagcggatcccagagcttcggcctgctggaccccaagctgtgctacctgctggatggcatcctgttcatctacggcgtgatcctgaccgccctgttcctgagagtgaagttcagcagaagcgccgacgcccctgcctaccagcagggacagaaccaactgtacaacgagctgaacctgggcagacgggaagagtacgacgtgctggacaagcggagaggcagggaccctgagatgggcggaaagccccagcggagaaagaacccccaggaaggactgtataacgaactccagaaagacaagatggccgaagcctacagcgagatcggcatgaagggcgagcggagaagaggcaagggccacgatggcctgtaccagggcctgagcaccgccaccaaggacacctatgacgccctgcacatgcaggccctgcctccaagaagggccaagcgatctggatctggagcaacaaacttctcactactcaaacaagcaggtgacgtggaggagaatcccgggcctactagtatggactggatttggcgcatccttttccttgtcggcgctgctaccggcgcgcattccttcgaagacggcgatagcgtgacccagacagagggactcgtgacactgaccgaaggactgcccgtgatgctgaactgcacctaccagacaatctacagcaaccccttcctgttttggtacgtgcagcacctgaacgagagccccagactgctgctgaagtccttcaccgacaacaagcggacagagcaccagggctttcacgccacactgcacaagagcagctccagcttccatctgcaaaagtctagcgcccagctgagcgacagcgccctgtactactgtgccttcgacaccaacacctacaaagtgatcttcggcaagggcacccatctgcacgtgctgcctaatgcctctacaaagggaccctccgtgtttcctctggctcccagcagcaagtctacaagcggaggaacagccgctctgggctgcctggtcaaggattactttcccgagcctgtgaccgtgtcctggaatagcggagcactgacaagcggcgtgcacacctttccagccgtgctgcaaagcagcggcctgtactctctgagcagcgtggtcacagtgcctagctctagcctgggcacccagacctacatctgcaatgtgaaccacaagcctagcaacaccaaggtggacaagagagtggaacccaagagctgtggtacccagagttttgggttgttggaccctaaattgtgctatctgttggacggaatcctgttcatttacggagtgatcctgaccgcattgttcctgcgggttaagttttccagatccgcagacgcacccgcttaccaacaagggcagaaccaactctacaatgaacttaatttggggcggagggaagagtacgacgttctggacaaaaggaggggacgagatcccgagatgggcggaaagcctcagcgaaggaagaatccgcaagaggggctttataacgaactccagaaagataaaatggcagaagcctatagtgagattgggatgaagggagaaaggaggaggggtaaaggtcacgatgggttgtaccaaggattgagcacagccactaaagatacctatgatgcgctccacatgcaggccctgccgccaaga

SEQ ID NO: 9462 - DNA, 1689 bp, Artificial Sequence
  Synthetic Polynucleotide
atggccttaccagtgaccgccttgctcctgccgctggccttgctgctccacgccgccaggccgctggtggacatgaaagtgacccagatgcctcgctacctgattaagcggatgggcgagaacgtgctgctggaatgcggccaggatatgagccacgagacaatgtactggtacagacaggaccctggcctgggcctccagctgatctacatctcctacgacgtggacagcaacagcgagggcgacatccctaagggctacagagtgtcccggaagaagagagagcacttcagcctgatcctggacagcgccaagaccaaccagaccagcgtgtacttctgtgccagcagcagcaccaacaccgaggtgttctttggcaagggcaccagactgaccgtgctcctcgagcagagcttcggcctgctggaccccaagctgtgctacctgctggatggcatcctgttcatctacggcgtgatcctgaccgccctgttcctgagagtgaagttcagcagaagcgccgacgcccctgcctaccagcagggacagaaccaactgtacaacgagctgaacctgggcagacgggaagagtacgacgtgctggacaagcggagaggcagggaccctgagatgggcggaaagccccagcggagaaagaacccccaggaaggactgtataacgaactccagaaagacaagatggccgaagcctacagcgagatcggcatgaagggcgagcggagaagaggcaagggccacgatggcctgtaccagggcctgagcaccgccaccaaggacacctatgacgccctgcacatgcaggccctgcctccaagaagggccaagcgatctggatctggagcaacaaacttctcactactcaaacaagcaggtgacgtggaggagaatcccgggcctactagtatggactggatttggcgcatccttttccttgtcggcgctgctaccggcgcgcattccttcgaagacggcgatagcgtgacccagacagagggactcgtgacactgaccgaaggactgcccgtgatgctgaactgcacctaccagacaatctacagcaaccccttcctgttttggtacgtgcagcacctgaacgagagccccagactgctgctgaagtccttcaccgacaacaagcggacagagcaccagggctttcacgccacactgcacaagagcagctccagcttccatctgcaaaagtctagcgcccagctgagcgacagcgccctgtactactgtgccttcgacaccaacacctacaaagtgatcttcggcaagggcacccatctgcacgtgctgcctaatacgcgtcagagttttgggttgttggaccctaaattgtgctatctgttggacggaatcctgttcatttacggagtgatcctgaccgcattgttcctgcgggttaagttttccagatccgcagacgcacccgcttaccaacaagggcagaaccaactctacaatgaacttaatttggggcggagggaagagtacgacgttctggacaaaaggaggggacgagatcccgagatgggcggaaagcctcagcgaaggaagaatccgcaagaggggctttataacgaactccagaaagataaaatggcagaagcctatagtgagattgggatgaagggagaaaggaggaggggtaaaggtcacgat

SEQ ID NO: 9463 - DNA, 2736 bp, Artificial Sequence
  Synthetic Polynucleotide
atggccttaccagtgaccgccttgctcctgccgctggccttgctgctccacgccgccaggccgctggtggacatgaaagtgacccagatgcctcgctacctgattaagcggatgggcgagaacgtgctgctggaatgcggccaggatatgagccacgagacaatgtactggtacagacaggaccctggcctgggcctccagctgatctacatctcctacgacgtggacagcaacagcgagggcgacatccctaagggctacagagtgtcccggaagaagagagagcacttcagcctgatcctggacagcgccaagaccaaccagaccagcgtgtacttctgtgccagcagcagcaccaacaccgaggtgttctttggcaagggcaccagactgaccgtgctcctcgagacaacacctggcgagagaagtagcctgcctgccttctatcctggcaccagcggctcttgttctggctgtggatctctgagcctgcctctgctggctggactggttgctgctgatgctgtggcctctctgctgattgtgggagccgtgttcctgtgcgccagacctagaagaagccccgctcaagaggacggcaaggtgtacatcaacatgcccggcagaggaagcactagtagagtgaagttcagcagaagcgccgacgcccctgcctaccagcagggacagaaccaactgtacaacgagctgaacctgggcagacgggaagagtacgacgtgctggacaagcggagaggcagggaccctgagatgggcggaaagccccagcggagaaagaacccccaggaaggactgtataacgaactccagaaagacaagatggccgaagcctacagcgagatcggcatgaagggcgagcggagaagaggcaagggccacgatggcctgtaccagggcctgagcaccgccaccaaggacacctatgacgccctgcacatgcaggccctgcctccaagaagggccaagcgatctggatctggagcaacaaacttctcactactcaaacaagcaggtgacgtggaggagaatcccgggcctatggactggatttggcgcatccttttccttgtcggcgctgctaccggcgcgcattccttcgaagacggcgatagcgtgacccagacagagggactcgtgacactgaccgaaggactgcccgtgatgctgaactgcacctaccagacaatctacagcaaccccttcctgttttggtacgtgcagcacctgaacgagagccccagactgctgctgaagtccttcaccgacaacaagcggacagagcaccagggctttcacgccacactgcacaagagcagctccagcttccatctgcaaaagtctagcgcccagctgagcgacagcgccctgtactactgtgccttcgacaccaacacctacaaagtgatcttcggcaagggcacccatctgcacgtgctgcctaatacgcgtacaacgccgggcgaaaggagttccttgccggccttttaccccggcacaagcggaagctgtagtgggtgtggaagcctcagcctcccacttcttgcgggcctcgtcgcggcagatgcagtagcttcacttcttattgtaggcgcggtatttctctgtgctcgaccaaggaggtcacccgctcaggaggatggtaaggtgtatataaatatgccaggacgcggaagctctagacgggttaagttttccagatccgcagacgcacccgcttaccaacaagggcagaaccaactctacaatgaacttaatttggggcggagggaagagtacgacgttctggacaaaaggaggggacgagatcccgagatgggcggaaagcctcagcgaaggaagaatccgcaagaggggctttataacgaactccagaaagataaaatggcagaagcctatagtgagattgggatgaagggagaaaggaggaggggtaaaggtcacgatgggttgtaccaaggattgagcacagccactaaagatacctatgatgcgctccacatgcaggccctgccgccaagacgcgccaagagaagcggatctggcgtgaagcagaccctgaatttcgacctgctgaagctggctggcgacgtggaatccaacccaggccctggccatatgaccgagtacaagcccacggtgcgcctcgccacccgcgacgacgtccccagggccgtacgcaccctcgccgccgcgttcgccgactaccccgccacgcgccacaccgtcgatccggaccgccacatcgagcgggtcaccgagctgcaagaactcttcctcacgcgcgtcgggctcgacatcggcaaggtgtgggtcgcggacgacggcgccgcggtggcggtctggaccacgccggagagcgtcgaagcgggggcggtgttcgccgagatcggcccgcgcatggccgagttgagcggttcccggctggccgcgcagcaacagatggaaggcctcctggcgccgcaccggcccaaggagcccgcgtggttcctggccaccgtcggcgtctcgcccgaccaccagggcaagggtctgggcagcgccgtcgtgctccccggagtggaggcggccgagcgcgccggggtgcccgccttcctggagacctccgcgccccgcaacctccccttctacgagcggctcggcttcaccgtcaccgccgacgtcgaggtgcccgaaggaccgcgcacctggtgcatgacccgcaagcccggtgcctga

SEQ ID NO: 9464 - DNA, 2736 bp, Artificial Sequence; identical to SEQ ID NO: 9463
  Synthetic Polynucleotide

SEQ ID NO: 9465 - DNA, 3339 bp, Artificial Sequence
  Synthetic Polynucleotide
atggccttaccagtgaccgccttgctcctgccgctggccttgctgctccacgccgccaggccgctggtggacatgaaagtgacccagatgcctcgctacctgattaagcggatgggcgagaacgtgctgctggaatgcggccaggatatgagccacgagacaatgtactggtacagacaggaccctggcctgggcctccagctgatctacatctcctacgacgtggacagcaacagcgagggcgacatccctaagggctacagagtgtcccggaagaagagagagcacttcagcctgatcctggacagcgccaagaccaaccagaccagcgtgtacttctgtgccagcagcagcaccaacaccgaggtgttctttggcaagggcaccagactgaccgtgctcctcgagggacagcctaaggccaatcctaccgtgacactgttccctccaagcagcgaagaactccaggccaacaaggccacacttgtgtgcctgatctccgacttctaccctggggctgtgacagtggcttggaaggccgatggatctcctgtgaaagccggcgtggaaaccaccaagccatccaagcagagcaacaacaaatacgccgccagctcctacctgagcctgacacctgagcagtggaagtcccacagatcctacagctgccaagtgacccacgaaggcagcaccgtggaaaagacagtggcccctacagagtgcagcggatccacaacacctggcgagagaagtagcctgcctgccttctatcctggcaccagcggctcttgttctggctgtggatctctgagcctgcctctgctggctggactggttgctgctgatgctgtggcctctctgctgattgtgggagccgtgttcctgtgcgccagacctagaagaagccccgctcaagaggacggcaaggtgtacatcaacatgcccggcagaggaagcactagtagagtgaagttcagcagaagcgccgacgcccctgcctaccagcagggacagaaccaactgtacaacgagctgaacctgggcagacgggaagagtacgacgtgctggacaagcggagaggcagggaccctgagatgggcggaaagccccagcggagaaagaacccccaggaaggactgtataacgaactccagaaagacaagatggccgaagcctacagcgagatcggcatgaagggcgagcggagaagaggcaagggccacgatggcctgtaccagggcctgagcaccgccaccaaggacacctatgacgccctgcacatgcaggccctgcctccaagaagggccaagcgatctggatctggagcaacaaacttctcactactcaaacaagcaggtgacgtggaggagaatcccgggcctatggactggatttggcgcatccttttccttgtcggcgctgctaccggcgcgcattccttcgaagacggcgatagcgtgacccagacagagggactcgtgacactgaccgaaggactgcccgtgatgctgaactgcacctaccagacaatctacagcaaccccttcctgttttggtacgtgcagcacctgaacgagagccccagactgctgctgaagtccttcaccgacaacaagcggacagagcaccagggctttcacgccacactgcacaagagcagctccagcttccatctgcaaaagtctagcgcccagctgagcgacagcgccctgtactactgtgccttcgacaccaacacctacaaagtgatcttcggcaagggcacccatctgcacgtgctgcctaatacgcgtgcctctacaaagggaccctccgtgtttcctctggctcccagcagcaagtctacaagcggaggaacagccgctctgggctgcctggtcaaggattactttcccgagcctgtgaccgtgtcctggaatagcggagcactgacaagcggcgtgcacacctttccagccgtgctgcaaagcagcggcctgtactctctgagcagcgtggtcacagtgcctagctctagcctgggcacccagacctacatctgcaatgtgaaccacaagcctagcaacaccaaggtggacaagagagtggaacccaagagctgtggtaccacaacgccgggcgaaaggagttccttgccggccttttaccccggcacaagcggaagctgtagtgggtgtggaagcctcagcctcccacttcttgcgggcctcgtcgcggcagatgcagtagcttcacttcttattgtaggcgcggtatttctctgtgctcgaccaaggaggtcacccgctcaggaggatggtaaggtgtatataaatatgccaggacgcggaagctctagacgggttaagttttccagatccgcagacgcacccgcttaccaacaagggcagaaccaactctacaatgaacttaatttggggcggagggaagagtacgacgttctggacaaaaggaggggacgagatcccgagatgggcggaaagcctcagcgaaggaagaatccgcaagaggggctttataacgaactccagaaagataaaatggcagaagcctatagtgagattgggatgaagggagaaaggaggaggggtaaaggtcacgatgggttgtaccaaggattgagcacagccactaaagatacctatgatgcgctccacatgcaggccctgccgccaagacgcgccaagagaagcggatctggcgtgaagcagaccctgaatttcgacctgctgaagctggctggcgacgtggaatccaacccaggccctggccatatggctacctacgaggtgctgtgcgaggtggcaagaaagctgggcaccgacgacagagaagtggtgctgttcctgctgaacgtgttcatccctcagcctacactggcccagctgatcggtgcactgagagccctgaaagaggaaggccggctgacctttcctctgctggccgaatgcctgttcagagccggaagaagggatctgctgcgggacctgctgcatctggaccccagatttctggaaagacacctggccggcaccatgagctacttcagcccttaccagctgaccgtgctgcacgttgacggcgaactgtgcgccagagatattcggagcctgatcttcctgagcaaggacaccatcggcagccggtctacccctcagacatttctgcactgggtgtactgcatggaaaacctggacctgctcggccccacagatgtggatgccctgatgtccatgctgagaagcctgagcagagtggacctccagagacaggtgcagacactgatgggactgcacctgagcggacctagccacagccagcactacagacacacccct

SEQ ID NO: 9466 - DNA, 3498 bp, Artificial Sequence
  Synthetic Polynucleotide
atggccttaccagtgaccgccttgctcctgccgctggccttgctgctccacgccgccaggccgctggtggacatgaaagtgacccagatgcctcgctacctgattaagcggatgggcgagaacgtgctgctggaatgcggccaggatatgagccacgagacaatgtactggtacagacaggaccctggcctgggcctccagctgatctacatctcctacgacgtggacagcaacagcgagggcgacatccctaagggctacagagtgtcccggaagaagagagagcacttcagcctgatcctggacagcgccaagaccaaccagaccagcgtgtacttctgtgccagcagcagcaccaacaccgaggtgttctttggcaagggcaccagactgaccgtgctcctcgagggacagcctaaggccaatcctaccgtgacactgttccctccaagcagcgaagaactccaggccaacaaggccacacttgtgtgcctgatctccgacttctaccctggggctgtgacagtggcttggaaggccgatggatctcctgtgaaagccggcgtggaaaccaccaagccatccaagcagagcaacaacaaatacgccgccagctcctacctgagcctgacacctgagcagtggaagtcccacagatcctacagctgccaagtgacccacgaaggcagcaccgtggaaaagacagtggcccctacagagtgcagcggatccacaacacctggcgagagaagtagcctgcctgccttctatcctggcaccagcggctcttgttctggctgtggatctctgagcctgcctctgctggctggactggttgctgctgatgctgtggcctctctgctgattgtgggagccgtgttcctgtgcgccagacctagaagaagccccgctcaagaggacggcaaggtgtacatcaacatgcccggcagaggaagcactagtagagtgaagttcagcagaagcgccgacgcccctgcctaccagcagggacagaaccaactgtacaacgagctgaacctgggcagacgggaagagtacgacgtgctggacaagcggagaggcagggaccctgagatgggcggaaagccccagcggagaaagaacccccaggaaggactgtataacgaactccagaaagacaagatggccgaagcctacagcgagatcggcatgaagggcgagcggagaagaggcaagggccacgatggcctgtaccagggcctgagcaccgccaccaaggacacctatgacgccctgcacatgcaggccctgcctccaagaagggccaagcgatctggatctggagcaacaaacttctcactactcaaacaagcaggtgacgtggaggagaatcccgggcctatggactggatttggcgcatccttttccttgtcggcgctgctaccggcgcgcattccttcgaagacggcgatagcgtgacccagacagagggactcgtgacactgaccgaaggactgcccgtgatgctgaactgcacctaccagacaatctacagcaaccccttcctgttttggtacgtgcagcacctgaacgagagccccagactgctgctgaagtccttcaccgacaacaagcggacagagcaccagggctttcacgccacactgcacaagagcagctccagcttccatctgcaaaagtctagcgcccagctgagcgacagcgccctgtactactgtgccttcgacaccaacacctacaaagtgatcttcggcaagggcacccatctgcacgtgctgcctaatacgcgtgcctctacaaagggaccctccgtgtttcctctggctcccagcagcaagtctacaagcggaggaacagccgctctgggctgcctggtcaaggattactttcccgagcctgtgaccgtgtcctggaatagcggagcactgacaagcggcgtgcacacctttccagccgtgctgcaaagcagcggcctgtactctctgagcagcgtggtcacagtgcctagctctagcctgggcacccagacctacatctgcaatgtgaaccacaagcctagcaacaccaaggtggacaagagagtggaacccaagagctgtggtaccacaacgccgggcgaaaggagttccttgccggccttttaccccggcacaagcggaagctgtagtgggtgtggaagcctcagcctcccacttcttgcgggcctcgtcgcggcagatgcagtagcttcacttcttattgtaggcgcggtatttctctgtgctcgaccaaggaggtcacccgctcaggaggatggtaaggtgtatataaatatgccaggacgcggaagctctagacgggttaagttttccagatccgcagacgcacccgcttaccaacaagggcagaaccaactctacaatgaacttaatttggggcggagggaagagtacgacgttctggacaaaaggaggggacgagatcccgagatgggcggaaagcctcagcgaaggaagaatccgcaagaggggctttataacgaactccagaaagataaaatggcagaagcctatagtgagattgggatgaagggagaaaggaggaggggtaaaggtcacgatgggttgtaccaaggattgagcacagccactaaagatacctatgatgcgctccacatgcaggccctgccgccaagacgcgccaagagaagcggatctggcgtgaagcagaccctgaatttcgacctgctgaagctggctggcgacgtggaatccaacccaggccctggccatatgtccgactccaaggaggtccctagccttccatttttgcgacacttgctcgaagagttggacagccatgaggacagcttgctgctgtttctgtgtcacgacgcggccccgggctgcacgacggtcacgcaagctttgtgctcgcttagccaacagcgcaagctgaccctcgcggctctggtcgagatgctctacgtgctgcagcgtatggatcttctcaagagccgcttcgggctcagcaaggagggggccgagcaattgctgggcacaagctttctcacgcgctaccgcaagctcatggtttgcgtgggtgaggagctcgactcgagcgagctacgcgctctacgcttgttcgcgtgcaacctgaatccgagcctgagcacggcgctttctgagagcagccgctttgtcgagcttgtactcgcgcttgaaaacgtaggactcgtctcgccatcgagtgtttccgtgcttgcggacatgttgcgcactcttcggcgcctcgatttgtgccagcagcttgttgagtacgaacaacaagagcaagccaggtaccgttactgttacgcggcctcgccctcattgccagttcgtacgttacgtcgggggcacggcgcgagtgaacacgagcagctgtgcatgcccgtgcaagaatcctctgacagccccgagctgctgcgcacgcccgtacaagaatcctccagcgacagccccgagcaaacgact

SEQ ID NO: 9467 - DNA, 3375 bp, Artificial Sequence
  Synthetic Polynucleotide
atggccttaccagtgaccgccttgctcctgccgctggccttgctgctccacgccgccaggccgctggtggacatgaaagtgacccagatgcctcgctacctgattaagcggatgggcgagaacgtgctgctggaatgcggccaggatatgagccacgagacaatgtactggtacagacaggaccctggcctgggcctccagctgatctacatctcctacgacgtggacagcaacagcgagggcgacatccctaagggctacagagtgtcccggaagaagagagagcacttcagcctgatcctggacagcgccaagaccaaccagaccagcgtgtacttctgtgccagcagcagcaccaacaccgaggtgttctttggcaagggcaccagactgaccgtgctcctcgagggacagcctaaggccaatcctaccgtgacactgttccctccaagcagcgaagaactccaggccaacaaggccacacttgtgtgcctgatctccgacttctaccctggggctgtgacagtggcttggaaggccgatggatctcctgtgaaagccggcgtggaaaccaccaagccatccaagcagagcaacaacaaatacgccgccagctcctacctgagcctgacacctgagcagtggaagtcccacagatcctacagctgccaagtgacccacgaaggcagcaccgtggaaaagacagtggcccctacagagtgcagcggatccacaacacctggcgagagaagtagcctgcctgccttctatcctggcaccagcggctcttgttctggctgtggatctctgagcctgcctctgctggctggactggttgctgctgatgctgtggcctctctgctgattgtgggagccgtgttcctgtgcgccagacctagaagaagccccgctcaagaggacggcaaggtgtacatcaacatgcccggcagaggaagcactagtagagtgaagttcagcagaagcgccgacgcccctgcctaccagcagggacagaaccaactgtacaacgagctgaacctgggcagacgggaagagtacgacgtgctggacaagcggagaggcagggaccctgagatgggcggaaagccccagcggagaaagaacccccaggaaggactgtataacgaactccagaaagacaagatggccgaagcctacagcgagatcggcatgaagggcgagcggagaagaggcaagggccacgatggcctgtaccagggcctgagcaccgccaccaaggacacctatgacgccctgcacatgcaggccctgcctccaagaagggccaagcgatctggatctggagcaacaaacttctcactactcaaacaagcaggtgacgtggaggagaatcccgggcctatggactggatttggcgcatccttttccttgtcggcgctgctaccggcgcgcattccttcgaagacggcgatagcgtgacccagacagagggactcgtgacactgaccgaaggactgcccgtgatgctgaactgcacctaccagacaatctacagcaaccccttcctgttttggtacgtgcagcacctgaacgagagccccagactgctgctgaagtccttcaccgacaacaagcggacagagcaccagggctttcacgccacactgcacaagagcagctccagcttccatctgcaaaagtctagcgcccagctgagcgacagcgccctgtactactgtgccttcgacaccaacacctacaaagtgatcttcggcaagggcacccatctgcacgtgctgcctaatacgcgtgcctctacaaagggaccctccgtgtttcctctggctcccagcagcaagtctacaagcggaggaacagccgctctgggctgcctggtcaaggattactttcccgagcctgtgaccgtgtcctggaatagcggagcactgacaagcggcgtgcacacctttccagccgtgctgcaaagcagcggcctgtactctctgagcagcgtggtcacagtgcctagctctagcctgggcacccagacctacatctgcaatgtgaaccacaagcctagcaacaccaaggtggacaagagagtggaacccaagagctgtggtaccacaacgccgggcgaaaggagttccttgccggccttttaccccggcacaagcggaagctgtagtgggtgtggaagcctcagcctcccacttcttgcgggcctcgtcgcggcagatgcagtagcttcacttcttattgtaggcgcggtatttctctgtgctcgaccaaggaggtcacccgctcaggaggatggtaaggtgtatataaatatgccaggacgcggaagctctagacgggttaagttttccagatccgcagacgcacccgcttaccaacaagggcagaaccaactctacaatgaacttaatttggggcggagggaagagtacgacgttctggacaaaaggaggggacgagatcccgagatgggcggaaagcctcagcgaaggaagaatccgcaagaggggctttataacgaactccagaaagataaaatggcagaagcctatagtgagattgggatgaagggagaaaggaggaggggtaaaggtcacgatgggttgtaccaaggattgagcacagccactaaagatacctatgatgcgctccacatgcaggccctgccgccaagacgcgccaagagaagcggatctggcgtgaagcagaccctgaatttcgacctgctgaagctggctggcgacgtggaatccaacccaggccctggccatatgaccgagtacaagcccacggtgcgcctcgccacccgcgacgacgtccccagggccgtacgcaccctcgccgccgcgttcgccgactaccccgccacgcgccacaccgtcgatccggaccgccacatcgagcgggtcaccgagctgcaagaactcttcctcacgcgcgtcgggctcgacatcggcaaggtgtgggtcgcggacgacggcgccgcggtggcggtctggaccacgccggagagcgtcgaagcgggggcggtgttcgccgagatcggcccgcgcatggccgagttgagcggttcccggctggccgcgcagcaacagatggaaggcctcctggcgccgcaccggcccaaggagcccgcgtggttcctggccaccgtcggcgtctcgcccgaccaccagggcaagggtctgggcagcgccgtcgtgctccccggagtggaggcggccgagcgcgccggggtgcccgccttcctggagacctccgcgccccgcaacctccccttctacgagcggctcggcttcaccgtcaccgccgacgtcgaggtgcccgaaggaccgcgcacctggtgcatgacccgcaagcccggtgcctga

SEQ ID NO: 9468 - DNA, 2457 bp, Artificial Sequence
  Synthetic Polynucleotide
atggccttaccagtgaccgccttgctcctgccgctggccttgctgctccacgccgccaggccggaattcctggtggacatgaaagtgacccagatgcctcgctacctgattaagcggatgggcgagaacgtgctgctggaatgcggccaggatatgagccacgagacaatgtactggtacagacaggaccctggcctgggcctccagctgatctacatctcctacgacgtggacagcaacagcgagggcgacatccctaagggctacagagtgtcccggaagaagagagagcacttcagcctgatcctggacagcgccaagaccaaccagaccagcgtgtacttctgtgccagcagcagcaccaacaccgaggtgttctttggcaagggcaccagactgaccgtgctcctcgaggacctgaagaacgtgttcccacctgaggtggccgtgttcgagcctagcgaggccgagatcagccacacccagaaagccaccctcgtgtgcctggctaccggcttctaccccgaccatgtggaactgtcttggtgggtcaacggcaaagaggtgcacagcggcgtgtctaccgacccccagccactgaaagaacagcccgccctgaacgacagccggtactgcctgagcagcagactgagagtgtccgccaccttctggcagaacccccggaaccacttcagatgccaggtgcagttctacggcctgagcgagaacgacgagtggacccaggacagagccaagcccgtgacccagatcgtgtctgccgaagcctggggcagagccgattgcggatcccagagcttcggcctgctggaccccaagctgtgctacctgctggatggcatcctgttcatctacggcgtgatcctgaccgccctgttcctgagagtgaagttcagcagaagcgccgacgcccctgcctaccagcagggacagaaccaactgtacaacgagctgaacctgggcagacgggaagagtacgacgtgctggacaagcggagaggcagggaccctgagatgggcggaaagccccagcggagaaagaacccccaggaaggactgtataacgaactccagaaagacaagatggccgaagcctacagcgagatcggcatgaagggcgagcggagaagaggcaagggccacgatggcctgtaccagggcctgagcaccgccaccaaggacacctatgacgccctgcacatgcaggccctgcctccaagaagggccaagcgatctggatctggagcaacaaacttctcactactcaaacaagcaggtgacgtggaggagaatcccgggcctactagtatggactggatttggcgcatccttttccttgtcggcgctgctaccggcgcgcattccttcgaagacggcgatagcgtgacccagacagagggactcgtgacactgaccgaaggactgcccgtgatgctgaactgcacctaccagacaatctacagcaaccccttcctgttttggtacgtgcagcacctgaacgagagccccagactgctgctgaagtccttcaccgacaacaagcggacagagcaccagggctttcacgccacactgcacaagagcagctccagcttccatctgcaaaagtctagcgcccagctgagcgacagcgccctgtactactgtgccttcgacaccaacacctacaaagtgatcttcggcaagggcacccatctgcacgtgctgcctaatacgcgtatccagaaccctgatcctgccgtgtaccagctgcgggatagcaagagcagcgacaagagcgtgtgtctgttcaccgacttcgacagccagaccaacgtgtcccagagcaaggactccgacgtgtacatcaccgataagaccgtgctggacatgcggagcatggacttcaagagcaactccgccgtggcctggtccaacaagtccgatttcgcctgcgccaacgccttcaacaacagcattatccccgaggacacattcttcccaagccccgagagcagctgcggtacccagagttttgggttgttggaccctaaattgtgctatctgttggacggaatcctgttcatttacggagtgatcctgaccgcattgttcctgcgggttaagttttccagatccgcagacgcacccgcttaccaacaagggcagaaccaactctacaatgaacttaatttggggcggagggaagagtacgacgttctggacaaaaggaggggacgagatcccgagatgggcggaaagcctcagcgaaggaagaatccgcaagaggggctttataacgaactccagaaagataaaatggcagaagcctatagtgagattgggatgaagggagaaaggaggaggggtaaaggtcacgatgggttgtaccaaggattgagcacagccactaaagatacctatgatgcgctccacatgcaggccctgccgccaagataa

SEQ ID NO: 9469 - DNA, 2583 bp, Artificial Sequence
  Synthetic Polynucleotide
atggccttaccagtgaccgccttgctcctgccgctggccttgctgctccacgccgccaggccggaattcctggtggacatgaaagtgacccagatgcctcgctacctgattaagcggatgggcgagaacgtgctgctggaatgcggccaggatatgagccacgagacaatgtactggtacagacaggaccctggcctgggcctccagctgatctacatctcctacgacgtggacagcaacagcgagggcgacatccctaagggctacagagtgtcccggaagaagagagagcacttcagcctgatcctggacagcgccaagaccaaccagaccagcgtgtacttctgtgccagcagcagcaccaacaccgaggtgttctttggcaagggcaccagactgaccgtgctcctcgaggacctgaagaacgtgttcccacctgaggtggccgtgttcgagcctagcgaggccgagatcagccacacccagaaagccaccctcgtgtgcctggctaccggcttctaccccgaccatgtggaactgtcttggtgggtcaacggcaaagaggtgcacagcggcgtgtctaccgacccccagccactgaaagaacagcccgccctgaacgacagccggtactgcctgagcagcagactgagagtgtccgccaccttctggcagaacccccggaaccacttcagatgccaggtgcagttctacggcctgagcgagaacgacgagtggacccaggacagagccaagcccgtgacccagatcgtgtctgccgaagcctggggcagagccgattgcggatcccagagcttcggcctgctggaccccaagctgtgctacctgctggatggcatcctgttcatctacggcgtgatcctgaccgccctgttcctgagagtgaagttcagcagaagcgccgacgcccctgcctaccagcagggacagaaccaactgtacaacgagctgaacctgggcagacgggaagagtacgacgtgctggacaagcggagaggcagggaccctgagatgggcggaaagccccagcggagaaagaacccccaggaaggactgtataacgaactccagaaagacaagatggccgaagcctacagcgagatcggcatgaagggcgagcggagaagaggcaagggccacgatggcctgtaccagggcctgagcaccgccaccaaggacacctatgacgccctgcacatgcaggccctgcctccaagaagggccaagcgatctggatctggagcaacaaacttctcactactcaaacaagcaggtgacgtggaggagaatcccgggcctactagtatggactggatttggcgcatccttttccttgtcggcgctgctaccggcgcgcattccttcgaagacggcgatagcgtgacccagacagagggactcgtgacactgaccgaaggactgcccgtgatgctgaactgcacctaccagacaatctacagcaaccccttcctgttttggtacgtgcagcacctgaacgagagccccagactgctgctgaagtccttcaccgacaacaagcggacagagcaccagggctttcacgccacactgcacaagagcagctccagcttccatctgcaaaagtctagcgcccagctgagcgacagcgccctgtactactgtgccttcgacaccaacacctacaaagtgatcttcggcaagggcacccatctgcacgtgctgcctaatacgcgtatccagaaccctgatcctgccgtgtaccagctgcgggatagcaagagcagcgacaagagcgtgtgtctgttcaccgacttcgacagccagaccaacgtgtcccagagcaaggactccgacgtgtacatcaccgataagaccgtgctggacatgcggagcatggacttcaagagcaactccgccgtggcctggtccaacaagtccgatttcgcctgcgccaacgccttcaacaacagcattatccccgaggacacattcttcccaagccccgagagcagctgcggtacccagagcttcggcctgctggaccccaagctgtgctacctgctggatggcatcctgttcatctacggcgtgatcctgaccgccctgttcctgaaacggggcagaaagaaactcctgtatatattcaaacaaccatttatgagaccagtacaaactactcaagaggaagatggctgtagctgccgatttccagaagaagaagaaggaggatgtgaactgagagtgaagttcagcagaagcgccgacgcccctgcctaccagcagggacagaaccaactgtacaacgagctgaacctgggcagacgggaagagtacgacgtgctggacaagcggagaggcagggaccctgagatgggcggaaagccccagcggagaaagaacccccaggaaggactgtataacgaactccagaaagacaagatggccgaagcctacagcgagatcggcatgaagggcgagcggagaagaggcaagggccacgatggcctgtaccagggcctgagcaccgccaccaaggacacctatgacgccctgcacatgcaggccctgcctccaagataa

SEQ ID NO: 9470 - DNA, 2580 bp, Artificial Sequence
  Synthetic Polynucleotide
atggccttaccagtgaccgccttgctcctgccgctggccttgctgctccacgccgccaggccggaattcctggtggacatgaaagtgacccagatgcctcgctacctgattaagcggatgggcgagaacgtgctgctggaatgcggccaggatatgagccacgagacaatgtactggtacagacaggaccctggcctgggcctccagctgatctacatctcctacgacgtggacagcaacagcgagggcgacatccctaagggctacagagtgtcccggaagaagagagagcacttcagcctgatcctggacagcgccaagaccaaccagaccagcgtgtacttctgtgccagcagcagcaccaacaccgaggtgttctttggcaagggcaccagactgaccgtgctcctcgaggacctgaagaacgtgttcccacctgaggtggccgtgttcgagcctagcgaggccgagatcagccacacccagaaagccaccctcgtgtgcctggctaccggcttctaccccgaccatgtggaactgtcttggtgggtcaacggcaaagaggtgcacagcggcgtgtctaccgacccccagccactgaaagaacagcccgccctgaacgacagccggtactgcctgagcagcagactgagagtgtccgccaccttctggcagaacccccggaaccacttcagatgccaggtgcagttctacggcctgagcgagaacgacgagtggacccaggacagagccaagcccgtgacccagatcgtgtctgccgaagcctggggcagagccgattgcggatcccagagcttcggcctgctggaccccaagctgtgctacctgctggatggcatcctgttcatctacggcgtgatcctgaccgccctgttcctgagagtgaagttcagcagaagcgccgacgcccctgcctaccagcagggacagaaccaactgtacaacgagctgaacctgggcagacgggaagagtacgacgtgctggacaagcggagaggcagggaccctgagatgggcggaaagccccagcggagaaagaacccccaggaaggactgtataacgaactccagaaagacaagatggccgaagcctacagcgagatcggcatgaagggcgagcggagaagaggcaagggccacgatggcctgtaccagggcctgagcaccgccaccaaggacacctatgacgccctgcacatgcaggccctgcctccaagaagggccaagcgatctggatctggagcaacaaacttctcactactcaaacaagcaggtgacgtggaggagaatcccgggcctactagtatggactggatttggcgcatccttttccttgtcggcgctgctaccggcgcgcattccttcgaagacggcgatagcgtgacccagacagagggactcgtgacactgaccgaaggactgcccgtgatgctgaactgcacctaccagacaatctacagcaaccccttcctgttttggtacgtgcagcacctgaacgagagccccagactgctgctgaagtccttcaccgacaacaagcggacagagcaccagggctttcacgccacactgcacaagagcagctccagcttccatctgcaaaagtctagcgcccagctgagcgacagcgccctgtactactgtgccttcgacaccaacacctacaaagtgatcttcggcaagggcacccatctgcacgtgctgcctaatacgcgtatccagaaccctgatcctgccgtgtaccagctgcgggatagcaagagcagcgacaagagcgtgtgtctgttcaccgacttcgacagccagaccaacgtgtcccagagcaaggactccgacgtgtacatcaccgataagaccgtgctggacatgcggagcatggacttcaagagcaactccgccgtggcctggtccaacaagtccgatttcgcctgcgccaacgccttcaacaacagcattatccccgaggacacattcttcccaagccccgagagcagctgcggtacccagagcttcggcctgctggaccccaagctgtgctacctgctggatggcatcctgttcatctacggcgtgatcctgaccgccctgttcctgaggagtaagaggagcaggctcctgcacagtgactacatgaacatgactccacgccgccccggacccacccgcaagcattaccagccctatgccccaccacgcgacttcgcagcctatcgctccagagtgaagttcagcagaagcgccgacgcccctgcctaccagcagggacagaaccaactgtacaacgagctgaacctgggcagacgggaagagtacgacgtgctggacaagcggagaggcagggaccctgagatgggcggaaagccccagcggagaaagaacccccaggaaggactgtataacgaactccagaaagacaagatggccgaagcctacagcgagatcggcatgaagggcgagcggagaagaggcaagggccacgatggcctgtaccagggcctgagcaccgccaccaaggacacctatgacgccctgcacatgcaggccctgcctccaagataa

SEQ ID NO: 9471 - DNA, 2565 bp, Artificial Sequence
  Synthetic Polynucleotide
atggccttaccagtgaccgccttgctcctgccgctggccttgctgctccacgccgccaggccggaattcctggtggacatgaaagtgacccagatgcctcgctacctgattaagcggatgggcgagaacgtgctgctggaatgcggccaggatatgagccacgagacaatgtactggtacagacaggaccctggcctgggcctccagctgatctacatctcctacgacgtggacagcaacagcgagggcgacatccctaagggctacagagtgtcccggaagaagagagagcacttcagcctgatcctggacagcgccaagaccaaccagaccagcgtgtacttctgtgccagcagcagcaccaacaccgaggtgttctttggcaagggcaccagactgaccgtgctcctcgaggacctgaagaacgtgttcccacctgaggtggccgtgttcgagcctagcgaggccgagatcagccacacccagaaagccaccctcgtgtgcctggctaccggcttctaccccgaccatgtggaactgtcttggtgggtcaacggcaaagaggtgcacagcggcgtgtctaccgacccccagccactgaaagaacagcccgccctgaacgacagccggtactgcctgagcagcagactgagagtgtccgccaccttctggcagaacccccggaaccacttcagatgccaggtgcagttctacggcctgagcgagaacgacgagtggacccaggacagagccaagcccgtgacccagatcgtgtctgccgaagcctggggcagagccgattgcggatcccagagcttcggcctgctggaccccaagctgtgctacctgctggatggcatcctgttcatctacggcgtgatcctgaccgccctgttcctgagagtgaagttcagcagaagcgccgacgcccctgcctaccagcagggacagaaccaactgtacaacgagctgaacctgggcagacgggaagagtacgacgtgctggacaagcggagaggcagggaccctgagatgggcggaaagccccagcggagaaagaacccccaggaaggactgtataacgaactccagaaagacaagatggccgaagcctacagcgagatcggcatgaagggcgagcggagaagaggcaagggccacgatggcctgtaccagggcctgagcaccgccaccaaggacacctatgacgccctgcacatgcaggccctgcctccaagaagggccaagcgatctggatctggagcaacaaacttctcactactcaaacaagcaggtgacgtggaggagaatcccgggcctactagtatggactggatttggcgcatccttttccttgtcggcgctgctaccggcgcgcattccttcgaagacggcgatagcgtgacccagacagagggactcgtgacactgaccgaaggactgcccgtgatgctgaactgcacctaccagacaatctacagcaaccccttcctgttttggtacgtgcagcacctgaacgagagccccagactgctgctgaagtccttcaccgacaacaagcggacagagcaccagggctttcacgccacactgcacaagagcagctccagcttccatctgcaaaagtctagcgcccagctgagcgacagcgccctgtactactgtgccttcgacaccaacacctacaaagtgatcttcggcaagggcacccatctgcacgtgctgcctaatacgcgtatccagaaccctgatcctgccgtgtaccagctgcgggatagcaagagcagcgacaagagcgtgtgtctgttcaccgacttcgacagccagaccaacgtgtcccagagcaaggactccgacgtgtacatcaccgataagaccgtgctggacatgcggagcatggacttcaagagcaactccgccgtggcctggtccaacaagtccgatttcgcctgcgccaacgccttcaacaacagcattatccccgaggacacattcttcccaagccccgagagcagctgcggtacccagagcttcggcctgctggaccccaagctgtgctacctgctggatggcatcctgttcatctacggcgtgatcctgaccgccctgttcctgagggaccaaagactgcctcctgacgctcacaaacctccaggcggaggcagcttcagaacccctatccaagaggaacaggctgacgcccacagcaccctggcaaaaattagagtgaagttcagcagaagcgccgacgcccctgcctaccagcagggacagaaccaactgtacaacgagctgaacctgggcagacgggaagagtacgacgtgctggacaagcggagaggcagggaccctgagatgggcggaaagccccagcggagaaagaacccccaggaaggactgtataacgaactccagaaagacaagatggccgaagcctacagcgagatcggcatgaagggcgagcggagaagaggcaagggccacgatggcctgtaccagggcctgagcaccgccaccaaggacacctatgacgccctgcacatgcaggccctgcctccaagataa

SEQ ID NO: 9472 - DNA, 2817 bp, Artificial Sequence
  Synthetic Polynucleotide
atggccttaccagtgaccgccttgctcctgccgctggccttgctgctccacgccgccaggccggaattcctggtggacatgaaagtgacccagatgcctcgctacctgattaagcggatgggcgagaacgtgctgctggaatgcggccaggatatgagccacgagacaatgtactggtacagacaggaccctggcctgggcctccagctgatctacatctcctacgacgtggacagcaacagcgagggcgacatccctaagggctacagagtgtcccggaagaagagagagcacttcagcctgatcctggacagcgccaagaccaaccagaccagcgtgtacttctgtgccagcagcagcaccaacaccgaggtgttctttggcaagggcaccagactgaccgtgctcctcgaggacctgaagaacgtgttcccacctgaggtggccgtgttcgagcctagcgaggccgagatcagccacacccagaaagccaccctcgtgtgcctggctaccggcttctaccccgaccatgtggaactgtcttggtgggtcaacggcaaagaggtgcacagcggcgtgtctaccgacccccagccactgaaagaacagcccgccctgaacgacagccggtactgcctgagcagcagactgagagtgtccgccaccttctggcagaacccccggaaccacttcagatgccaggtgcagttctacggcctgagcgagaacgacgagtggacccaggacagagccaagcccgtgacccagatcgtgtctgccgaagcctggggcagagccgattgcggatcccagagcttcggcctgctggaccccaagctgtgctacctgctggatggcatcctgttcatctacggcgtgatcctgaccgccctgttcctgagagtgaagttcagcagaagcgccgacgcccctgcctaccagcagggacagaaccaactgtacaacgagctgaacctgggcagacgggaagagtacgacgtgctggacaagcggagaggcagggaccctgagatgggcggaaagccccagcggagaaagaacccccaggaaggactgtataacgaactccagaaagacaagatggccgaagcctacagcgagatcggcatgaagggcgagcggagaagaggcaagggccacgatggcctgtaccagggcctgagcaccgccaccaaggacacctatgacgccctgcacatgcaggccctgcctccaagaagggccaagcgatctggatctggagcaacaaacttctcactactcaaacaagcaggtgacgtggaggagaatcccgggcctactagtatggactggatttggcgcatccttttccttgtcggcgctgctaccggcgcgcattccttcgaagacggcgatagcgtgacccagacagagggactcgtgacactgaccgaaggactgcccgtgatgctgaactgcacctaccagacaatctacagcaaccccttcctgttttggtacgtgcagcacctgaacgagagccccagactgctgctgaagtccttcaccgacaacaagcggacagagcaccagggctttcacgccacactgcacaagagcagctccagcttccatctgcaaaagtctagcgcccagctgagcgacagcgccctgtactactgtgccttcgacaccaacacctacaaagtgatcttcggcaagggcacccatctgcacgtgctgcctaatacgcgtatccagaaccctgatcctgccgtgtaccagctgcgggatagcaagagcagcgacaagagcgtgtgtctgttcaccgacttcgacagccagaccaacgtgtcccagagcaaggactccgacgtgtacatcaccgataagaccgtgctggacatgcggagcatggacttcaagagcaactccgccgtggcctggtccaacaagtccgatttcgcctgcgccaacgccttcaacaacagcattatccccgaggacacattcttcccaagccccgagagcagctgcggtacccagagcttcggcctgctggaccccaagctgtgctacctgctggatggcatcctgttcatctacggcgtgatcctgaccgccctgttcctgtggcggcggaagcggaaagagaagcagtctgagacaagccccaaagagttcctgaccatctacgaggacgtgaaggacctgaaaacccggcggaaccacgaacaagagcagacctttcctggcggaggcagcaccatctacagcatgatccagagccagagcagcgcccctacaagccaagagcctgcctacacactgtactccctgatccagcctagcagaaagagcggcagccggaagagaaatcacagccccagcttcaacagcacgatctacgaagtgatcggcaagagccagccaaaggctcagaaccctgccagactgagccggaaagagctggaaaacttcgacgtgtacagcagagtgaagttcagcagaagcgccgacgcccctgcctaccagcagggacagaaccaactgtacaacgagctgaacctgggcagacgggaagagtacgacgtgctggacaagcggagaggcagggaccctgagatgggcggaaagccccagcggagaaagaacccccaggaaggactgtataacgaactccagaaagacaagatggccgaagcctacagcgagatcggcatgaagggcgagcggagaagaggcaagggccacgatggcctgtaccagggcctgagcaccgccaccaaggacacctatgacgccctgcacatgcaggccctgcctccaagataa

SEQ ID NO: 9473 - DNA, 2706 bp, Artificial Sequence
  Synthetic Polynucleotide
atggccttaccagtgaccgccttgctcctgccgctggccttgctgctccacgccgccaggccggaattcctggtggacatgaaagtgacccagatgcctcgctacctgattaagcggatgggcgagaacgtgctgctggaatgcggccaggatatgagccacgagacaatgtactggtacagacaggaccctggcctgggcctccagctgatctacatctcctacgacgtggacagcaacagcgagggcgacatccctaagggctacagagtgtcccggaagaagagagagcacttcagcctgatcctggacagcgccaagaccaaccagaccagcgtgtacttctgtgccagcagcagcaccaacaccgaggtgttctttggcaagggcaccagactgaccgtgctcctcgaggacctgaagaacgtgttcccacctgaggtggccgtgttcgagcctagcgaggccgagatcagccacacccagaaagccaccctcgtgtgcctggctaccggcttctaccccgaccatgtggaactgtcttggtgggtcaacggcaaagaggtgcacagcggcgtgtctaccgacccccagccactgaaagaacagcccgccctgaacgacagccggtactgcctgagcagcagactgagagtgtccgccaccttctggcagaacccccggaaccacttcagatgccaggtgcagttctacggcctgagcgagaacgacgagtggacccaggacagagccaagcccgtgacccagatcgtgtctgccgaagcctggggcagagccgattgcggatcccagagcttcggcctgctggaccccaagctgtgctacctgctggatggcatcctgttcatctacggcgtgatcctgaccgccctgttcctgaggagtaagaggagcaggctcctgcacagtgactacatgaacatgactccacgccgccccggacccacccgcaagcattaccagccctatgccccaccacgcgacttcgcagcctatcgctccagagtgaagttcagcagaagcgccgacgcccctgcctaccagcagggacagaaccaactgtacaacgagctgaacctgggcagacgggaagagtacgacgtgctggacaagcggagaggcagggaccctgagatgggcggaaagccccagcggagaaagaacccccaggaaggactgtataacgaactccagaaagacaagatggccgaagcctacagcgagatcggcatgaagggcgagcggagaagaggcaagggccacgatggcctgtaccagggcctgagcaccgccaccaaggacacctatgacgccctgcacatgcaggccctgcctccaagaagggccaagcgatctggatctggagcaacaaacttctcactactcaaacaagcaggtgacgtggaggagaatcccgggcctactagtatggactggatttggcgcatccttttccttgtcggcgctgctaccggcgcgcattccttcgaagacggcgatagcgtgacccagacagagggactcgtgacactgaccgaaggactgcccgtgatgctgaactgcacctaccagacaatctacagcaaccccttcctgttttggtacgtgcagcacctgaacgagagccccagactgctgctgaagtccttcaccgacaacaagcggacagagcaccagggctttcacgccacactgcacaagagcagctccagcttccatctgcaaaagtctagcgcccagctgagcgacagcgccctgtactactgtgccttcgacaccaacacctacaaagtgatcttcggcaagggcacccatctgcacgtgctgcctaatacgcgtatccagaaccctgatcctgccgtgtaccagctgcgggatagcaagagcagcgacaagagcgtgtgtctgttcaccgacttcgacagccagaccaacgtgtcccagagcaaggactccgacgtgtacatcaccgataagaccgtgctggacatgcggagcatggacttcaagagcaactccgccgtggcctggtccaacaagtccgatttcgcctgcgccaacgccttcaacaacagcattatccccgaggacacattcttcccaagccccgagagcagctgcggtacccagagcttcggcctgctggaccccaagctgtgctacctgctggatggcatcctgttcatctacggcgtgatcctgaccgccctgttcctgaaacggggcagaaagaaactcctgtatatattcaaacaaccatttatgagaccagtacaaactactcaagaggaagatggctgtagctgccgatttccagaagaagaagaaggaggatgtgaactgagagtgaagttcagcagaagcgccgacgcccctgcctaccagcagggacagaaccaactgtacaacgagctgaacctgggcagacgggaagagtacgacgtgctggacaagcggagaggcagggaccctgagatgggcggaaagccccagcggagaaagaacccccaggaaggactgtataacgaactccagaaagacaagatggccgaagcctacagcgagatcggcatgaagggcgagcggagaagaggcaagggccacgatggcctgtaccagggcctgagcaccgccaccaaggacacctatgacgccctgcacatgcaggccctgcctccaagataa

SEQ ID NO: 9474 - DNA, 2703 bp, Artificial Sequence
  Synthetic Polynucleotide
atggccttaccagtgaccgccttgctcctgccgctggccttgctgctccacgccgccaggccggaattcctggtggacatgaaagtgacccagatgcctcgctacctgattaagcggatgggcgagaacgtgctgctggaatgcggccaggatatgagccacgagacaatgtactggtacagacaggaccctggcctgggcctccagctgatctacatctcctacgacgtggacagcaacagcgagggcgacatccctaagggctacagagtgtcccggaagaagagagagcacttcagcctgatcctggacagcgccaagaccaaccagaccagcgtgtacttctgtgccagcagcagcaccaacaccgaggtgttctttggcaagggcaccagactgaccgtgctcctcgaggacctgaagaacgtgttcccacctgaggtggccgtgttcgagcctagcgaggccgagatcagccacacccagaaagccaccctcgtgtgcctggctaccggcttctaccccgaccatgtggaactgtcttggtgggtcaacggcaaagaggtgcacagcggcgtgtctaccgacccccagccactgaaagaacagcccgccctgaacgacagccggtactgcctgagcagcagactgagagtgtccgccaccttctggcagaacccccggaaccacttcagatgccaggtgcagttctacggcctgagcgagaacgacgagtggacccaggacagagccaagcccgtgacccagatcgtgtctgccgaagcctggggcagagccgattgcggatcccagagcttcggcctgctggaccccaagctgtgctacctgctggatggcatcctgttcatctacggcgtgatcctgaccgccctgttcctgaggagtaagaggagcaggctcctgcacagtgactacatgaacatgactccacgccgccccggacccacccgcaagcattaccagccctatgccccaccacgcgacttcgcagcctatcgctccagagtgaagttcagcagaagcgccgacgcccctgcctaccagcagggacagaaccaactgtacaacgagctgaacctgggcagacgggaagagtacgacgtgctggacaagcggagaggcagggaccctgagatgggcggaaagccccagcggagaaagaacccccaggaaggactgtataacgaactccagaaagacaagatggccgaagcctacagcgagatcggcatgaagggcgagcggagaagaggcaagggccacgatggcctgtaccagggcctgagcaccgccaccaaggacacctatgacgccctgcacatgcaggccctgcctccaagaagggccaagcgatctggatctggagcaacaaacttctcactactcaaacaagcaggtgacgtggaggagaatcccgggcctactagtatggactggatttggcgcatccttttccttgtcggcgctgctaccggcgcgcattccttcgaagacggcgatagcgtgacccagacagagggactcgtgacactgaccgaaggactgcccgtgatgctgaactgcacctaccagacaatctacagcaaccccttcctgttttggtacgtgcagcacctgaacgagagccccagactgctgctgaagtccttcaccgacaacaagcggacagagcaccagggctttcacgccacactgcacaagagcagctccagcttccatctgcaaaagtctagcgcccagctgagcgacagcgccctgtactactgtgccttcgacaccaacacctacaaagtgatcttcggcaagggcacccatctgcacgtgctgcctaatacgcgtatccagaaccctgatcctgccgtgtaccagctgcgggatagcaagagcagcgacaagagcgtgtgtctgttcaccgacttcgacagccagaccaacgtgtcccagagcaaggactccgacgtgtacatcaccgataagaccgtgctggacatgcggagcatggacttcaagagcaactccgccgtggcctggtccaacaagtccgatttcgcctgcgccaacgccttcaacaacagcattatccccgaggacacattcttcccaagccccgagagcagctgcggtacccagagttttgggttgttggaccctaaattgtgctatctgttggacggaatcctgttcatttacggagtgatcctgaccgcattgttcctgaggagcaagcggtcacggctgctccacagcgattacatgaatatgacaccacgaagaccgggtcctactcgcaaacactaccaaccctacgcacctccccgcgactttgcagcgtaccgatctcgggttaagttttccagatccgcagacgcacccgcttaccaacaagggcagaaccaactctacaatgaacttaatttggggcggagggaagagtacgacgttctggacaaaaggaggggacgagatcccgagatgggcggaaagcctcagcgaaggaagaatccgcaagaggggctttataacgaactccagaaagataaaatggcagaagcctatagtgagattgggatgaagggagaaaggaggaggggtaaaggtcacgatgggttgtaccaaggattgagcacagccactaaagatacctatgatgcgctccacatgcaggccctgccgccaagataa

SEQ ID NO: 9475 - DNA, 2706 bp, Artificial Sequence
  Synthetic Polynucleotide
atggccttaccagtgaccgccttgctcctgccgctggccttgctgctccacgccgccaggccggaattcctggtggacatgaaagtgacccagatgcctcgctacctgattaagcggatgggcgagaacgtgctgctggaatgcggccaggatatgagccacgagacaatgtactggtacagacaggaccctggcctgggcctccagctgatctacatctcctacgacgtggacagcaacagcgagggcgacatccctaagggctacagagtgtcccggaagaagagagagcacttcagcctgatcctggacagcgccaagaccaaccagaccagcgtgtacttctgtgccagcagcagcaccaacaccgaggtgttctttggcaagggcaccagactgaccgtgctcctcgaggacctgaagaacgtgttcccacctgaggtggccgtgttcgagcctagcgaggccgagatcagccacacccagaaagccaccctcgtgtgcctggctaccggcttctaccccgaccatgtggaactgtcttggtgggtcaacggcaaagaggtgcacagcggcgtgtctaccgacccccagccactgaaagaacagcccgccctgaacgacagccggtactgcctgagcagcagactgagagtgtccgccaccttctggcagaacccccggaaccacttcagatgccaggtgcagttctacggcctgagcgagaacgacgagtggacccaggacagagccaagcccgtgacccagatcgtgtctgccgaagcctggggcagagccgattgcggatcccagagcttcggcctgctggaccccaagctgtgctacctgctggatggcatcctgttcatctacggcgtgatcctgaccgccctgttcctgaggagtaagaggagcaggctcctgcacagtgactacatgaacatgactccacgccgccccggacccacccgcaagcattaccagccctatgccccaccacgcgacttcgcagcctatcgctccagagtgaagttcagcagaagcgccgacgcccctgcctaccagcagggacagaaccaactgtacaacgagctgaacctgggcagacgggaagagtacgacgtgctggacaagcggagaggcagggaccctgagatgggcggaaagccccagcggagaaagaacccccaggaaggactgtataacgaactccagaaagacaagatggccgaagcctacagcgagatcggcatgaagggcgagcggagaagaggcaagggccacgatggcctgtaccagggcctgagcaccgccaccaaggacacctatgacgccctgcacatgcaggccctgcctccaagaagggccaagcgatctggatctggagcaacaaacttctcactactcaaacaagcaggtgacgtggaggagaatcccgggcctactagtatggactggatttggcgcatccttttccttgtcggcgctgctaccggcgcgcattccttcgaagacggcgatagcgtgacccagacagagggactcgtgacactgaccgaaggactgcccgtgatgctgaactgcacctaccagacaatctacagcaaccccttcctgttttggtacgtgcagcacctgaacgagagccccagactgctgctgaagtccttcaccgacaacaagcggacagagcaccagggctttcacgccacactgcacaagagcagctccagcttccatctgcaaaagtctagcgcccagctgagcgacagcgccctgtactactgtgccttcgacaccaacacctacaaagtgatcttcggcaagggcacccatctgcacgtgctgcctaatacgcgtatccagaaccctgatcctgccgtgtaccagctgcgggatagcaagagcagcgacaagagcgtgtgtctgttcaccgacttcgacagccagaccaacgtgtcccagagcaaggactccgacgtgtacatcaccgataagaccgtgctggacatgcggagcatggacttcaagagcaactccgccgtggcctggtccaacaagtccgatttcgcctgcgccaacgccttcaacaacagcattatccccgaggacacattcttcccaagccccgagagcagctgcggtacccagagttttgggttgttggaccctaaattgtgctatctgttggacggaatcctgttcatttacggagtgatcctgaccgcattgttcctgaagagaggccggaagaagctgctgtacatcttcaagcagcctttcatgcggcccgtgcagaccacccaggaagaggacggctgctcctgccggttccccgaggaagaagaaggcggctgcgagctgcgggttaagttttccagatccgcagacgcacccgcttaccaacaagggcagaaccaactctacaatgaacttaatttggggcggagggaagagtacgacgttctggacaaaaggaggggacgagatcccgagatgggcggaaagcctcagcgaaggaagaatccgcaagaggggctttataacgaactccagaaagataaaatggcagaagcctatagtgagattgggatgaagggagaaaggaggaggggtaaaggtcacgatgggttgtaccaaggattgagcacagccactaaagatacctatgatgcgctccacatgcaggccctgccgccaagataa

SEQ ID NO: 9476 - DNA, 2457 bp, Artificial Sequence
  Synthetic Polynucleotide
atggccttaccagtgaccgccttgctcctgccgctggccttgctgctccacgccgccaggccggaattcctggtggacatgaaagtgacccagatgcctcgctacctgattaagcggatgggcgagaacgtgctgctggaatgcggccaggatatgagccacgagacaatgtactggtacagacaggaccctggcctgggcctccagctgatctacatctcctacgacgtggacagcaacagcgagggcgacatccctaagggctacagagtgtcccggaagaagagagagcacttcagcctgatcctggacagcgccaagaccaaccagaccagcgtgtacttctgtgccagcagcagcaccaacaccgaggtgttctttggcaagggcaccagactgaccgtgctcctcgaggacctgaagaacgtgttcccacctgaggtggccgtgttcgagcctagcgaggccgagatcagccacacccagaaagccaccctcgtgtgcctggctaccggcttctaccccgaccatgtggaactgtcttggtgggtcaacggcaaagaggtgcacagcggcgtgtctaccgacccccagccactgaaagaacagcccgccctgaacgacagccggtactgcctgagcagcagactgagagtgtccgccaccttctggcagaacccccggaaccacttcagatgccaggtgcagttctacggcctgagcgagaacgacgagtggacccaggacagagccaagcccgtgacccagatcgtgtctgccgaagcctggggcagagccgattgcggatcccagagcttcggcctgctggaccccaagctgtgctacctgctggatggcatcctgttcatctacggcgtgatcctgaccgccctgttcctgagagtgaagttcagcagaagcgccgacgcccctgcctaccagcagggacagaaccaactgtacaacgagctgaacctgggcagacgggaagagtacgacgtgctggacaagcggagaggcagggaccctgagatgggcggaaagccccagcggagaaagaacccccaggaaggactgttcaacgaactccagaaagacaagatggccgaagccttcagcgagatcggcatgaagggcgagcggagaagaggcaagggccacgatggcctgttccagggcctgagcaccgccaccaaggacaccttcgacgccctgcacatgcaggccctgcctccaagaagggccaagcgatctggatctggagcaacaaacttctcactactcaaacaagcaggtgacgtggaggagaatcccgggcctactagtatggactggatttggcgcatccttttccttgtcggcgctgctaccggcgcgcattccttcgaagacggcgatagcgtgacccagacagagggactcgtgacactgaccgaaggactgcccgtgatgctgaactgcacctaccagacaatctacagcaaccccttcctgttttggtacgtgcagcacctgaacgagagccccagactgctgctgaagtccttcaccgacaacaagcggacagagcaccagggctttcacgccacactgcacaagagcagctccagcttccatctgcaaaagtctagcgcccagctgagcgacagcgccctgtactactgtgccttcgacaccaacacctacaaagtgatcttcggcaagggcacccatctgcacgtgctgcctaatacgcgtatccagaaccctgatcctgccgtgtaccagctgcgggatagcaagagcagcgacaagagcgtgtgtctgttcaccgacttcgacagccagaccaacgtgtcccagagcaaggactccgacgtgtacatcaccgataagaccgtgctggacatgcggagcatggacttcaagagcaactccgccgtggcctggtccaacaagtccgatttcgcctgcgccaacgccttcaacaacagcattatccccgaggacacattcttcccaagccccgagagcagctgcggtacccagagttttgggttgttggaccctaaattgtgctatctgttggacggaatcctgttcatttacggagtgatcctgaccgcattgttcctgcgggttaagttttccagatccgcagacgcacccgcttaccaacaagggcagaaccaactctacaatgaacttaatttggggcggagggaagagtacgacgttctggacaaaaggaggggacgagatcccgagatgggcggaaagcctcagcgaaggaagaatccgcaagaggggctttataacgaactccagaaagataaaatggcagaagcctatagtgagattgggatgaagggagaaaggaggaggggtaaaggtcacgatgggttgtaccaaggattgagcacagccactaaagatacctatgatgcgctccacatgcaggccctgccgccaagataa

SEQ ID NO: 9477 - DNA, 2457 bp, Artificial Sequence
  Synthetic Polynucleotide
atggccttaccagtgaccgccttgctcctgccgctggccttgctgctccacgccgccaggccggaattcctggtggacatgaaagtgacccagatgcctcgctacctgattaagcggatgggcgagaacgtgctgctggaatgcggccaggatatgagccacgagacaatgtactggtacagacaggaccctggcctgggcctccagctgatctacatctcctacgacgtggacagcaacagcgagggcgacatccctaagggctacagagtgtcccggaagaagagagagcacttcagcctgatcctggacagcgccaagaccaaccagaccagcgtgtacttctgtgccagcagcagcaccaacaccgaggtgttctttggcaagggcaccagactgaccgtgctcctcgaggacctgaagaacgtgttcccacctgaggtggccgtgttcgagcctagcgaggccgagatcagccacacccagaaagccaccctcgtgtgcctggctaccggcttctaccccgaccatgtggaactgtcttggtgggtcaacggcaaagaggtgcacagcggcgtgtctaccgacccccagccactgaaagaacagcccgccctgaacgacagccggtactgcctgagcagcagactgagagtgtccgccaccttctggcagaacccccggaaccacttcagatgccaggtgcagttctacggcctgagcgagaacgacgagtggacccaggacagagccaagcccgtgacccagatcgtgtctgccgaagcctggggcagagccgattgcggatcccagagcttcggcctgctggaccccaagctgtgctacctgctggatggcatcctgttcatctacggcgtgatcctgaccgccctgttcctgagagtgaagttcagcagaagcgccgacgcccctgcctaccagcagggacagaaccaactgtacaacgagctgaacctgggcagacgggaagagtacgacgtgctggacaagcggagaggcagggaccctgagatgggcggaaagccccagcggagaaagaacccccaggaaggactgttcaacgaactccagaaagacaagatggccgaagccttcagcgagatcggcatgaagggcgagcggagaagaggcaagggccacgatggcctgttccagggcctgagcaccgccaccaaggacaccttcgacgccctgcacatgcaggccctgcctccaagaagggccaagcgatctggatctggagcaacaaacttctcactactcaaacaagcaggtgacgtggaggagaatcccgggcctactagtatggactggatttggcgcatccttttccttgtcggcgctgctaccggcgcgcattccttcgaagacggcgatagcgtgacccagacagagggactcgtgacactgaccgaaggactgcccgtgatgctgaactgcacctaccagacaatctacagcaaccccttcctgttttggtacgtgcagcacctgaacgagagccccagactgctgctgaagtccttcaccgacaacaagcggacagagcaccagggctttcacgccacactgcacaagagcagctccagcttccatctgcaaaagtctagcgcccagctgagcgacagcgccctgtactactgtgccttcgacaccaacacctacaaagtgatcttcggcaagggcacccatctgcacgtgctgcctaatacgcgtatccagaaccctgatcctgccgtgtaccagctgcgggatagcaagagcagcgacaagagcgtgtgtctgttcaccgacttcgacagccagaccaacgtgtcccagagcaaggactccgacgtgtacatcaccgataagaccgtgctggacatgcggagcatggacttcaagagcaactccgccgtggcctggtccaacaagtccgatttcgcctgcgccaacgccttcaacaacagcattatccccgaggacacattcttcccaagccccgagagcagctgcggtacccagagcttcggcctgctggaccccaagctgtgctacctgctggatggcatcctgttcatctacggcgtgatcctgaccgccctgttcctgagagtgaagttcagcagaagcgccgacgcccctgcctaccagcagggacagaaccaactgtacaacgagctgaacctgggcagacgggaagagtacgacgtgctggacaagcggagaggcagggaccctgagatgggcggaaagccccagcggagaaagaacccccaggaaggactgtataacgaactccagaaagacaagatggccgaagcctacagcgagatcggcatgaagggcgagcggagaagaggcaagggccacgatggcctgtaccagggcctgagcaccgccaccaaggacacctatgacgccctgcacatgcaggccctgcctccaagataa

SEQ ID NO: 9478 - DNA, 2583 bp, Artificial Sequence
  Synthetic Polynucleotide
atggccttaccagtgaccgccttgctcctgccgctggccttgctgctccacgccgccaggccggaattcctggtggacatgaaagtgacccagatgcctcgctacctgattaagcggatgggcgagaacgtgctgctggaatgcggccaggatatgagccacgagacaatgtactggtacagacaggaccctggcctgggcctccagctgatctacatctcctacgacgtggacagcaacagcgagggcgacatccctaagggctacagagtgtcccggaagaagagagagcacttcagcctgatcctggacagcgccaagaccaaccagaccagcgtgtacttctgtgccagcagcagcaccaacaccgaggtgttctttggcaagggcaccagactgaccgtgctcctcgaggacctgaagaacgtgttcccacctgaggtggccgtgttcgagcctagcgaggccgagatcagccacacccagaaagccaccctcgtgtgcctggctaccggcttctaccccgaccatgtggaactgtcttggtgggtcaacggcaaagaggtgcacagcggcgtgtctaccgacccccagccactgaaagaacagcccgccctgaacgacagccggtactgcctgagcagcagactgagagtgtccgccaccttctggcagaacccccggaaccacttcagatgccaggtgcagttctacggcctgagcgagaacgacgagtggacccaggacagagccaagcccgtgacccagatcgtgtctgccgaagcctggggcagagccgattgcggatcccagagcttcggcctgctggaccccaagctgtgctacctgctggatggcatcctgttcatctacggcgtgatcctgaccgccctgttcctgagagtgaagttcagcagaagcgccgacgcccctgcctaccagcagggacagaaccaactgtacaacgagctgaacctgggcagacgggaagagtacgacgtgctggacaagcggagaggcagggaccctgagatgggcggaaagccccagcggagaaagaacccccaggaaggactgttcaacgaactccagaaagacaagatggccgaagccttcagcgagatcggcatgaagggcgagcggagaagaggcaagggccacgatggcctgttccagggcctgagcaccgccaccaaggacaccttcgacgccctgcacatgcaggccctgcctccaagaagggccaagcgatctggatctggagcaacaaacttctcactactcaaacaagcaggtgacgtggaggagaatcccgggcctactagtatggactggatttggcgcatccttttccttgtcggcgctgctaccggcgcgcattccttcgaagacggcgatagcgtgacccagacagagggactcgtgacactgaccgaaggactgcccgtgatgctgaactgcacctaccagacaatctacagcaaccccttcctgttttggtacgtgcagcacctgaacgagagccccagactgctgctgaagtccttcaccgacaacaagcggacagagcaccagggctttcacgccacactgcacaagagcagctccagcttccatctgcaaaagtctagcgcccagctgagcgacagcgccctgtactactgtgccttcgacaccaacacctacaaagtgatcttcggcaagggcacccatctgcacgtgctgcctaatacgcgtatccagaaccctgatcctgccgtgtaccagctgcgggatagcaagagcagcgacaagagcgtgtgtctgttcaccgacttcgacagccagaccaacgtgtcccagagcaaggactccgacgtgtacatcaccgataagaccgtgctggacatgcggagcatggacttcaagagcaactccgccgtggcctggtccaacaagtccgatttcgcctgcgccaacgccttcaacaacagcattatccccgaggacacattcttcccaagccccgagagcagctgcggtacccagagcttcggcctgctggaccccaagctgtgctacctgctggatggcatcctgttcatctacggcgtgatcctgaccgccctgttcctgaaacggggcagaaagaaactcctgtatatattcaaacaaccatttatgagaccagtacaaactactcaagaggaagatggctgtagctgccgatttccagaagaagaagaaggaggatgtgaactgagagtgaagttcagcagaagcgccgacgcccctgcctaccagcagggacagaaccaactgtacaacgagctgaacctgggcagacgggaagagtacgacgtgctggacaagcggagaggcagggaccctgagatgggcggaaagccccagcggagaaagaacccccaggaaggactgtataacgaactccagaaagacaagatggccgaagcctacagcgagatcggcatgaagggcgagcggagaagaggcaagggccacgatggcctgtaccagggcctgagcaccgccaccaaggacacctatgacgccctgcacatgcaggccctgcctccaagataa

SEQ ID NO: 9479 - DNA, 2580 bp, Artificial Sequence
  Synthetic Polynucleotide
atggccttaccagtgaccgccttgctcctgccgctggccttgctgctccacgccgccaggccggaattcctggtggacatgaaagtgacccagatgcctcgctacctgattaagcggatgggcgagaacgtgctgctggaatgcggccaggatatgagccacgagacaatgtactggtacagacaggaccctggcctgggcctccagctgatctacatctcctacgacgtggacagcaacagcgagggcgacatccctaagggctacagagtgtcccggaagaagagagagcacttcagcctgatcctggacagcgccaagaccaaccagaccagcgtgtacttctgtgccagcagcagcaccaacaccgaggtgttctttggcaagggcaccagactgaccgtgctcctcgaggacctgaagaacgtgttcccacctgaggtggccgtgttcgagcctagcgaggccgagatcagccacacccagaaagccaccctcgtgtgcctggctaccggcttctaccccgaccatgtggaactgtcttggtgggtcaacggcaaagaggtgcacagcggcgtgtctaccgacccccagccactgaaagaacagcccgccctgaacgacagccggtactgcctgagcagcagactgagagtgtccgccaccttctggcagaacccccggaaccacttcagatgccaggtgcagttctacggcctgagcgagaacgacgagtggacccaggacagagccaagcccgtgacccagatcgtgtctgccgaagcctggggcagagccgattgcggatcccagagcttcggcctgctggaccccaagctgtgctacctgctggatggcatcctgttcatctacggcgtgatcctgaccgccctgttcctgagagtgaagttcagcagaagcgccgacgcccctgcctaccagcagggacagaaccaactgtacaacgagctgaacctgggcagacgggaagagtacgacgtgctggacaagcggagaggcagggaccctgagatgggcggaaagccccagcggagaaagaacccccaggaaggactgttcaacgaactccagaaagacaagatggccgaagccttcagcgagatcggcatgaagggcgagcggagaagaggcaagggccacgatggcctgttccagggcctgagcaccgccaccaaggacaccttcgacgccctgcacatgcaggccctgcctccaagaagggccaagcgatctggatctggagcaacaaacttctcactactcaaacaagcaggtgacgtggaggagaatcccgggcctactagtatggactggatttggcgcatccttttccttgtcggcgctgctaccggcgcgcattccttcgaagacggcgatagcgtgacccagacagagggactcgtgacactgaccgaaggactgcccgtgatgctgaactgcacctaccagacaatctacagcaaccccttcctgttttggtacgtgcagcacctgaacgagagccccagactgctgctgaagtccttcaccgacaacaagcggacagagcaccagggctttcacgccacactgcacaagagcagctccagcttccatctgcaaaagtctagcgcccagctgagcgacagcgccctgtactactgtgccttcgacaccaacacctacaaagtgatcttcggcaagggcacccatctgcacgtgctgcctaatacgcgtatccagaaccctgatcctgccgtgtaccagctgcgggatagcaagagcagcgacaagagcgtgtgtctgttcaccgacttcgacagccagaccaacgtgtcccagagcaaggactccgacgtgtacatcaccgataagaccgtgctggacatgcggagcatggacttcaagagcaactccgccgtggcctggtccaacaagtccgatttcgcctgcgccaacgccttcaacaacagcattatccccgaggacacattcttcccaagccccgagagcagctgcggtacccagagcttcggcctgctggaccccaagctgtgctacctgctggatggcatcctgttcatctacggcgtgatcctgaccgccctgttcctgaggagtaagaggagcaggctcctgcacagtgactacatgaacatgactccacgccgccccggacccacccgcaagcattaccagccctatgccccaccacgcgacttcgcagcctatcgctccagagtgaagttcagcagaagcgccgacgcccctgcctaccagcagggacagaaccaactgtacaacgagctgaacctgggcagacgggaagagtacgacgtgctggacaagcggagaggcagggaccctgagatgggcggaaagccccagcggagaaagaacccccaggaaggactgtataacgaactccagaaagacaagatggccgaagcctacagcgagatcggcatgaagggcgagcggagaagaggcaagggccacgatggcctgtaccagggcctgagcaccgccaccaaggacacctatgacgccctgcacatgcaggccctgcctccaagataa

SEQ ID NO: 9480 - DNA, 2565 bp, Artificial Sequence
  Synthetic Polynucleotide
atggccttaccagtgaccgccttgctcctgccgctggccttgctgctccacgccgccaggccggaattcctggtggacatgaaagtgacccagatgcctcgctacctgattaagcggatgggcgagaacgtgctgctggaatgcggccaggatatgagccacgagacaatgtactggtacagacaggaccctggcctgggcctccagctgatctacatctcctacgacgtggacagcaacagcgagggcgacatccctaagggctacagagtgtcccggaagaagagagagcacttcagcctgatcctggacagcgccaagaccaaccagaccagcgtgtacttctgtgccagcagcagcaccaacaccgaggtgttctttggcaagggcaccagactgaccgtgctcctcgaggacctgaagaacgtgttcccacctgaggtggccgtgttcgagcctagcgaggccgagatcagccacacccagaaagccaccctcgtgtgcctggctaccggcttctaccccgaccatgtggaactgtcttggtgggtcaacggcaaagaggtgcacagcggcgtgtctaccgacccccagccactgaaagaacagcccgccctgaacgacagccggtactgcctgagcagcagactgagagtgtccgccaccttctggcagaacccccggaaccacttcagatgccaggtgcagttctacggcctgagcgagaacgacgagtggacccaggacagagccaagcccgtgacccagatcgtgtctgccgaagcctggggcagagccgattgcggatcccagagcttcggcctgctggaccccaagctgtgctacctgctggatggcatcctgttcatctacggcgtgatcctgaccgccctgttcctgagagtgaagttcagcagaagcgccgacgcccctgcctaccagcagggacagaaccaactgtacaacgagctgaacctgggcagacgggaagagtacgacgtgctggacaagcggagaggcagggaccctgagatgggcggaaagccccagcggagaaagaacccccaggaaggactgttcaacgaactccagaaagacaagatggccgaagccttcagcgagatcggcatgaagggcgagcggagaagaggcaagggccacgatggcctgttccagggcctgagcaccgccaccaaggacaccttcgacgccctgcacatgcaggccctgcctccaagaagggccaagcgatctggatctggagcaacaaacttctcactactcaaacaagcaggtgacgtggaggagaatcccgggcctactagtatggactggatttggcgcatccttttccttgtcggcgctgctaccggcgcgcattccttcgaagacggcgatagcgtgacccagacagagggactcgtgacactgaccgaaggactgcccgtgatgctgaactgcacctaccagacaatctacagcaaccccttcctgttttggtacgtgcagcacctgaacgagagccccagactgctgctgaagtccttcaccgacaacaagcggacagagcaccagggctttcacgccacactgcacaagagcagctccagcttccatctgcaaaagtctagcgcccagctgagcgacagcgccctgtactactgtgccttcgacaccaacacctacaaagtgatcttcggcaagggcacccatctgcacgtgctgcctaatacgcgtatccagaaccctgatcctgccgtgtaccagctgcgggatagcaagagcagcgacaagagcgtgtgtctgttcaccgacttcgacagccagaccaacgtgtcccagagcaaggactccgacgtgtacatcaccgataagaccgtgctggacatgcggagcatggacttcaagagcaactccgccgtggcctggtccaacaagtccgatttcgcctgcgccaacgccttcaacaacagcattatccccgaggacacattcttcccaagccccgagagcagctgcggtacccagagcttcggcctgctggaccccaagctgtgctacctgctggatggcatcctgttcatctacggcgtgatcctgaccgccctgttcctgagggaccaaagactgcctcctgacgctcacaaacctccaggcggaggcagcttcagaacccctatccaagaggaacaggctgacgcccacagcaccctggcaaaaattagagtgaagttcagcagaagcgccgacgcccctgcctaccagcagggacagaaccaactgtacaacgagctgaacctgggcagacgggaagagtacgacgtgctggacaagcggagaggcagggaccctgagatgggcggaaagccccagcggagaaagaacccccaggaaggactgtataacgaactccagaaagacaagatggccgaagcctacagcgagatcggcatgaagggcgagcggagaagaggcaagggccacgatggcctgtaccagggcctgagcaccgccaccaaggacacctatgacgccctgcacatgcaggccctgcctccaagataa

SEQ ID NO: 9481 - DNA, 2817 bp, Artificial Sequence
  Synthetic Polynucleotide
atggccttaccagtgaccgccttgctcctgccgctggccttgctgctccacgccgccaggccggaattcctggtggacatgaaagtgacccagatgcctcgctacctgattaagcggatgggcgagaacgtgctgctggaatgcggccaggatatgagccacgagacaatgtactggtacagacaggaccctggcctgggcctccagctgatctacatctcctacgacgtggacagcaacagcgagggcgacatccctaagggctacagagtgtcccggaagaagagagagcacttcagcctgatcctggacagcgccaagaccaaccagaccagcgtgtacttctgtgccagcagcagcaccaacaccgaggtgttctttggcaagggcaccagactgaccgtgctcctcgaggacctgaagaacgtgttcccacctgaggtggccgtgttcgagcctagcgaggccgagatcagccacacccagaaagccaccctcgtgtgcctggctaccggcttctaccccgaccatgtggaactgtcttggtgggtcaacggcaaagaggtgcacagcggcgtgtctaccgacccccagccactgaaagaacagcccgccctgaacgacagccggtactgcctgagcagcagactgagagtgtccgccaccttctggcagaacccccggaaccacttcagatgccaggtgcagttctacggcctgagcgagaacgacgagtggacccaggacagagccaagcccgtgacccagatcgtgtctgccgaagcctggggcagagccgattgcggatcccagagcttcggcctgctggaccccaagctgtgctacctgctggatggcatcctgttcatctacggcgtgatcctgaccgccctgttcctgagagtgaagttcagcagaagcgccgacgcccctgcctaccagcagggacagaaccaactgtacaacgagctgaacctgggcagacgggaagagtacgacgtgctggacaagcggagaggcagggaccctgagatgggcggaaagccccagcggagaaagaacccccaggaaggactgttcaacgaactccagaaagacaagatggccgaagccttcagcgagatcggcatgaagggcgagcggagaagaggcaagggccacgatggcctgttccagggcctgagcaccgccaccaaggacaccttcgacgccctgcacatgcaggccctgcctccaagaagggccaagcgatctggatctggagcaacaaacttctcactactcaaacaagcaggtgacgtggaggagaatcccgggcctactagtatggactggatttggcgcatccttttccttgtcggcgctgctaccggcgcgcattccttcgaagacggcgatagcgtgacccagacagagggactcgtgacactgaccgaaggactgcccgtgatgctgaactgcacctaccagacaatctacagcaaccccttcctgttttggtacgtgcagcacctgaacgagagccccagactgctgctgaagtccttcaccgacaacaagcggacagagcaccagggctttcacgccacactgcacaagagcagctccagcttccatctgcaaaagtctagcgcccagctgagcgacagcgccctgtactactgtgccttcgacaccaacacctacaaagtgatcttcggcaagggcacccatctgcacgtgctgcctaatacgcgtatccagaaccctgatcctgccgtgtaccagctgcgggatagcaagagcagcgacaagagcgtgtgtctgttcaccgacttcgacagccagaccaacgtgtcccagagcaaggactccgacgtgtacatcaccgataagaccgtgctggacatgcggagcatggacttcaagagcaactccgccgtggcctggtccaacaagtccgatttcgcctgcgccaacgccttcaacaacagcattatccccgaggacacattcttcccaagccccgagagcagctgcggtacccagagcttcggcctgctggaccccaagctgtgctacctgctggatggcatcctgttcatctacggcgtgatcctgaccgccctgttcctgtggcggcggaagcggaaagagaagcagtctgagacaagccccaaagagttcctgaccatctacgaggacgtgaaggacctgaaaacccggcggaaccacgaacaagagcagacctttcctggcggaggcagcaccatctacagcatgatccagagccagagcagcgcccctacaagccaagagcctgcctacacactgtactccctgatccagcctagcagaaagagcggcagccggaagagaaatcacagccccagcttcaacagcacgatctacgaagtgatcggcaagagccagccaaaggctcagaaccctgccagactgagccggaaagagctggaaaacttcgacgtgtacagcagagtgaagttcagcagaagcgccgacgcccctgcctaccagcagggacagaaccaactgtacaacgagctgaacctgggcagacgggaagagtacgacgtgctggacaagcggagaggcagggaccctgagatgggcggaaagccccagcggagaaagaacccccaggaaggactgtataacgaactccagaaagacaagatggccgaagcctacagcgagatcggcatgaagggcgagcggagaagaggcaagggccacgatggcctgtaccagggcctgagcaccgccaccaaggacacctatgacgccctgcacatgcaggccctgcctccaagataa

SEQ ID NO: 9482 - DNA, 2580 bp, Artificial Sequence
  Synthetic Polynucleotide
atggccttaccagtgaccgccttgctcctgccgctggccttgctgctccacgccgccaggccggaattcctggtggacatgaaagtgacccagatgcctcgctacctgattaagcggatgggcgagaacgtgctgctggaatgcggccaggatatgagccacgagacaatgtactggtacagacaggaccctggcctgggcctccagctgatctacatctcctacgacgtggacagcaacagcgagggcgacatccctaagggctacagagtgtcccggaagaagagagagcacttcagcctgatcctggacagcgccaagaccaaccagaccagcgtgtacttctgtgccagcagcagcaccaacaccgaggtgttctttggcaagggcaccagactgaccgtgctcctcgaggacctgaagaacgtgttcccacctgaggtggccgtgttcgagcctagcgaggccgagatcagccacacccagaaagccaccctcgtgtgcctggctaccggcttctaccccgaccatgtggaactgtcttggtgggtcaacggcaaagaggtgcacagcggcgtgtctaccgacccccagccactgaaagaacagcccgccctgaacgacagccggtactgcctgagcagcagactgagagtgtccgccaccttctggcagaacccccggaaccacttcagatgccaggtgcagttctacggcctgagcgagaacgacgagtggacccaggacagagccaagcccgtgacccagatcgtgtctgccgaagcctggggcagagccgattgcggatcccagagcttcggcctgctggaccccaagctgtgctacctgctggatggcatcctgttcatctacggcgtgatcctgaccgccctgttcctgagagtgaagttcagcagaagcgccgacgcccctgcctaccagcagggacagaaccaactgtacaacgagctgaacctgggcagacgggaagagtacgacgtgctggacaagcggagaggcagggaccctgagatgggcggaaagccccagcggagaaagaacccccaggaaggactgttcaacgaactccagaaagacaagatggccgaagccttcagcgagatcggcatgaagggcgagcggagaagaggcaagggccacgatggcctgttccagggcctgagcaccgccaccaaggacaccttcgacgccctgcacatgcaggccctgcctccaagaagggccaagcgatctggatctggagcaacaaacttctcactactcaaacaagcaggtgacgtggaggagaatcccgggcctactagtatggactggatttggcgcatccttttccttgtcggcgctgctaccggcgcgcattccttcgaagacggcgatagcgtgacccagacagagggactcgtgacactgaccgaaggactgcccgtgatgctgaactgcacctaccagacaatctacagcaaccccttcctgttttggtacgtgcagcacctgaacgagagccccagactgctgctgaagtccttcaccgacaacaagcggacagagcaccagggctttcacgccacactgcacaagagcagctccagcttccatctgcaaaagtctagcgcccagctgagcgacagcgccctgtactactgtgccttcgacaccaacacctacaaagtgatcttcggcaagggcacccatctgcacgtgctgcctaatacgcgtatccagaaccctgatcctgccgtgtaccagctgcgggatagcaagagcagcgacaagagcgtgtgtctgttcaccgacttcgacagccagaccaacgtgtcccagagcaaggactccgacgtgtacatcaccgataagaccgtgctggacatgcggagcatggacttcaagagcaactccgccgtggcctggtccaacaagtccgatttcgcctgcgccaacgccttcaacaacagcattatccccgaggacacattcttcccaagccccgagagcagctgcggtacccagagttttgggttgttggaccctaaattgtgctatctgttggacggaatcctgttcatttacggagtgatcctgaccgcattgttcctgaggagcaagcggtcacggctgctccacagcgattacatgaatatgacaccacgaagaccgggtcctactcgcaaacactaccaaccctacgcacctccccgcgactttgcagcgtaccgatctcgggttaagttttccagatccgcagacgcacccgcttaccaacaagggcagaaccaactctacaatgaacttaatttggggcggagggaagagtacgacgttctggacaaaaggaggggacgagatcccgagatgggcggaaagcctcagcgaaggaagaatccgcaagaggggctttataacgaactccagaaagataaaatggcagaagcctatagtgagattgggatgaagggagaaaggaggaggggtaaaggtcacgatgggttgtaccaaggattgagcacagccactaaagatacctatgatgcgctccacatgcaggccctgccgccaagataa

SEQ ID NO: 9483 - DNA, 2583 bp, Artificial Sequence
  Synthetic Polynucleotide
atggccttaccagtgaccgccttgctcctgccgctggccttgctgctccacgccgccaggccggaattcctggtggacatgaaagtgacccagatgcctcgctacctgattaagcggatgggcgagaacgtgctgctggaatgcggccaggatatgagccacgagacaatgtactggtacagacaggaccctggcctgggcctccagctgatctacatctcctacgacgtggacagcaacagcgagggcgacatccctaagggctacagagtgtcccggaagaagagagagcacttcagcctgatcctggacagcgccaagaccaaccagaccagcgtgtacttctgtgccagcagcagcaccaacaccgaggtgttctttggcaagggcaccagactgaccgtgctcctcgaggacctgaagaacgtgttcccacctgaggtggccgtgttcgagcctagcgaggccgagatcagccacacccagaaagccaccctcgtgtgcctggctaccggcttctaccccgaccatgtggaactgtcttggtgggtcaacggcaaagaggtgcacagcggcgtgtctaccgacccccagccactgaaagaacagcccgccctgaacgacagccggtactgcctgagcagcagactgagagtgtccgccaccttctggcagaacccccggaaccacttcagatgccaggtgcagttctacggcctgagcgagaacgacgagtggacccaggacagagccaagcccgtgacccagatcgtgtctgccgaagcctggggcagagccgattgcggatcccagagcttcggcctgctggaccccaagctgtgctacctgctggatggcatcctgttcatctacggcgtgatcctgaccgccctgttcctgagagtgaagttcagcagaagcgccgacgcccctgcctaccagcagggacagaaccaactgtacaacgagctgaacctgggcagacgggaagagtacgacgtgctggacaagcggagaggcagggaccctgagatgggcggaaagccccagcggagaaagaacccccaggaaggactgttcaacgaactccagaaagacaagatggccgaagccttcagcgagatcggcatgaagggcgagcggagaagaggcaagggccacgatggcctgttccagggcctgagcaccgccaccaaggacaccttcgacgccctgcacatgcaggccctgcctccaagaagggccaagcgatctggatctggagcaacaaacttctcactactcaaacaagcaggtgacgtggaggagaatcccgggcctactagtatggactggatttggcgcatccttttccttgtcggcgctgctaccggcgcgcattccttcgaagacggcgatagcgtgacccagacagagggactcgtgacactgaccgaaggactgcccgtgatgctgaactgcacctaccagacaatctacagcaaccccttcctgttttggtacgtgcagcacctgaacgagagccccagactgctgctgaagtccttcaccgacaacaagcggacagagcaccagggctttcacgccacactgcacaagagcagctccagcttccatctgcaaaagtctagcgcccagctgagcgacagcgccctgtactactgtgccttcgacaccaacacctacaaagtgatcttcggcaagggcacccatctgcacgtgctgcctaatacgcgtatccagaaccctgatcctgccgtgtaccagctgcgggatagcaagagcagcgacaagagcgtgtgtctgttcaccgacttcgacagccagaccaacgtgtcccagagcaaggactccgacgtgtacatcaccgataagaccgtgctggacatgcggagcatggacttcaagagcaactccgccgtggcctggtccaacaagtccgatttcgcctgcgccaacgccttcaacaacagcattatccccgaggacacattcttcccaagccccgagagcagctgcggtacccagagttttgggttgttggaccctaaattgtgctatctgttggacggaatcctgttcatttacggagtgatcctgaccgcattgttcctgaagagaggccggaagaagctgctgtacatcttcaagcagcctttcatgcggcccgtgcagaccacccaggaagaggacggctgctcctgccggttccccgaggaagaagaaggcggctgcgagctgcgggttaagttttccagatccgcagacgcacccgcttaccaacaagggcagaaccaactctacaatgaacttaatttggggcggagggaagagtacgacgttctggacaaaaggaggggacgagatcccgagatgggcggaaagcctcagcgaaggaagaatccgcaagaggggctttataacgaactccagaaagataaaatggcagaagcctatagtgagattgggatgaagggagaaaggaggaggggtaaaggtcacgatgggttgtaccaaggattgagcacagccactaaagatacctatgatgcgctccacatgcaggccctgccgccaagataa

SEQ ID NO: 9484 - DNA, 2457 bp, Artificial Sequence
  Synthetic Polynucleotide
atggccttaccagtgaccgccttgctcctgccgctggccttgctgctccacgccgccaggccggaattcctggtggacatgaaagtgacccagatgcctcgctacctgattaagcggatgggcgagaacgtgctgctggaatgcggccaggatatgagccacgagacaatgtactggtacagacaggaccctggcctgggcctccagctgatctacatctcctacgacgtggacagcaacagcgagggcgacatccctaagggctacagagtgtcccggaagaagagagagcacttcagcctgatcctggacagcgccaagaccaaccagaccagcgtgtacttctgtgccagcagcagcaccaacaccgaggtgttctttggcaagggcaccagactgaccgtgctcctcgaggacctgaagaacgtgttcccacctgaggtggccgtgttcgagcctagcgaggccgagatcagccacacccagaaagccaccctcgtgtgcctggctaccggcttctaccccgaccatgtggaactgtcttggtgggtcaacggcaaagaggtgcacagcggcgtgtctaccgacccccagccactgaaagaacagcccgccctgaacgacagccggtactgcctgagcagcagactgagagtgtccgccaccttctggcagaacccccggaaccacttcagatgccaggtgcagttctacggcctgagcgagaacgacgagtggacccaggacagagccaagcccgtgacccagatcgtgtctgccgaagcctggggcagagccgattgcggatcccagagcttcggcctgctggaccccaagctgtgctacctgctggatggcatcctgttcatctacggcgtgatcctgaccgccctgttcctgagagtgaagttcagcagaagcgccgacgcccctgcctaccagcagggacagaaccaactgtacaacgagctgaacctgggcagacgggaagagtacgacgtgctggacaagcggagaggcagggaccctgagatgggcggaaagccccagcggagaaagaacccccaggaaggactgttcaacgaactccagaaagacaagatggccgaagccttcagcgagatcggcatgaagggcgagcggagaagaggcaagggccacgatggcctgttccagggcctgagcaccgccaccaaggacaccttcgacgccctgcacatgcaggccctgcctccaagaagggccaagcgatctggatctggagcaacaaacttctcactactcaaacaagcaggtgacgtggaggagaatcccgggcctactagtatggactggatttggcgcatccttttccttgtcggcgctgctaccggcgcgcattccttcgaagacggcgatagcgtgacccagacagagggactcgtgacactgaccgaaggactgcccgtgatgctgaactgcacctaccagacaatctacagcaaccccttcctgttttggtacgtgcagcacctgaacgagagccccagactgctgctgaagtccttcaccgacaacaagcggacagagcaccagggctttcacgccacactgcacaagagcagctccagcttccatctgcaaaagtctagcgcccagctgagcgacagcgccctgtactactgtgccttcgacaccaacacctacaaagtgatcttcggcaagggcacccatctgcacgtgctgcctaatacgcgtatccagaaccctgatcctgccgtgtaccagctgcgggatagcaagagcagcgacaagagcgtgtgtctgttcaccgacttcgacagccagaccaacgtgtcccagagcaaggactccgacgtgtacatcaccgataagaccgtgctggacatgcggagcatggacttcaagagcaactccgccgtggcctggtccaacaagtccgatttcgcctgcgccaacgccttcaacaacagcattatccccgaggacacattcttcccaagccccgagagcagctgcggtacccagagcttcggcctgctggaccccaagctgagctacctgctggatggcatcctgttcatctacggcgtgatcctgaccgccctgttcctgagagtgaagttcagcagaagcgccgacgcccctgcctaccagcagggacagaaccaactgtacaacgagctgaacctgggcagacgggaagagtacgacgtgctggacaagcggagaggcagggaccctgagatgggcggaaagccccagcggagaaagaacccccaggaaggactgtataacgaactccagaaagacaagatggccgaagcctacagcgagatcggcatgaagggcgagcggagaagaggcaagggccacgatggcctgtaccagggcctgagcaccgccaccaaggacacctatgacgccctgcacatgcaggccctgcctccaagataa

SEQ ID NO: 9485 - DNA, 2457 bp, Artificial Sequence
  Synthetic Polynucleotide
atggccttaccagtgaccgccttgctcctgccgctggccttgctgctccacgccgccaggccggaattcctggtggacatgaaagtgacccagatgcctcgctacctgattaagcggatgggcgagaacgtgctgctggaatgcggccaggatatgagccacgagacaatgtactggtacagacaggaccctggcctgggcctccagctgatctacatctcctacgacgtggacagcaacagcgagggcgacatccctaagggctacagagtgtcccggaagaagagagagcacttcagcctgatcctggacagcgccaagaccaaccagaccagcgtgtacttctgtgccagcagcagcaccaacaccgaggtgttctttggcaagggcaccagactgaccgtgctcctcgaggacctgaagaacgtgttcccacctgaggtggccgtgttcgagcctagcgaggccgagatcagccacacccagaaagccaccctcgtgtgcctggctaccggcttctaccccgaccatgtggaactgtcttggtgggtcaacggcaaagaggtgcacagcggcgtgtctaccgacccccagccactgaaagaacagcccgccctgaacgacagccggtactgcctgagcagcagactgagagtgtccgccaccttctggcagaacccccggaaccacttcagatgccaggtgcagttctacggcctgagcgagaacgacgagtggacccaggacagagccaagcccgtgacccagatcgtgtctgccgaagcctggggcagagccgattgcggatcccagagcttcggcctgctggaccccaagctgtgctacctgctggatggcatcctgttcatctacggcgtgatcctgaccgccctgttcctgagagtgaagttcagcagaagcgccgacgcccctgcctaccagcagggacagaaccaactgtacaacgagctgaacctgggcagacgggaagagtacgacgtgctggacaagcggagaggcagggaccctgagatgggcggaaagccccagcggagaaagaacccccaggaaggactgttcaacgaactccagaaagacaagatggccgaagccttcagcgagatcggcatgaagggcgagcggagaagaggcaagggccacgatggcctgttccagggcctgagcaccgccaccaaggacaccttcgacgccctgcacatgcaggccctgcctccaagaagggccaagcgatctggatctggagcaacaaacttctcactactcaaacaagcaggtgacgtggaggagaatcccgggcctactagtatggactggatttggcgcatccttttccttgtcggcgctgctaccggcgcgcattccttcgaagacggcgatagcgtgacccagacagagggactcgtgacactgaccgaaggactgcccgtgatgctgaactgcacctaccagacaatctacagcaaccccttcctgttttggtacgtgcagcacctgaacgagagccccagactgctgctgaagtccttcaccgacaacaagcggacagagcaccagggctttcacgccacactgcacaagagcagctccagcttccatctgcaaaagtctagcgcccagctgagcgacagcgccctgtactactgtgccttcgacaccaacacctacaaagtgatcttcggcaagggcacccatctgcacgtgctgcctaatacgcgtatccagaaccctgatcctgccgtgtaccagctgcgggatagcaagagcagcgacaagagcgtgtgtctgttcaccgacttcgacagccagaccaacgtgtcccagagcaaggactccgacgtgtacatcaccgataagaccgtgctggacatgcggagcatggacttcaagagcaactccgccgtggcctggtccaacaagtccgatttcgcctgcgccaacgccttcaacaacagcattatccccgaggacacattcttcccaagccccgagagcagctgcggtacccagagttttgggttgttggaccctaaattgagctatctgttggacggaatcctgttcatttacggagtgatcctgaccgcattgttcctgcgggttaagttttccagatccgcagacgcacccgcttaccaacaagggcagaaccaactctacaatgaacttaatttggggcggagggaagagtacgacgttctggacaaaaggaggggacgagatcccgagatgggcggaaagcctcagcgaaggaagaatccgcaagaggggctttataacgaactccagaaagataaaatggcagaagcctatagtgagattgggatgaagggagaaaggaggaggggtaaaggtcacgatgggttgtaccaaggattgagcacagccactaaagatacctatgatgcgctccacatgcaggccctgccgccaagataa

SEQ ID NO: 9486 - DNA, 2457 bp, Artificial Sequence
  Synthetic Polynucleotide
atggccttaccagtgaccgccttgctcctgccgctggccttgctgctccacgccgccaggccggaattcctggtggacatgaaagtgacccagatgcctcgctacctgattaagcggatgggcgagaacgtgctgctggaatgcggccaggatatgagccacgagacaatgtactggtacagacaggaccctggcctgggcctccagctgatctacatctcctacgacgtggacagcaacagcgagggcgacatccctaagggctacagagtgtcccggaagaagagagagcacttcagcctgatcctggacagcgccaagaccaaccagaccagcgtgtacttctgtgccagcagcagcaccaacaccgaggtgttctttggcaagggcaccagactgaccgtgctcctcgaggacctgaagaacgtgttcccacctgaggtggccgtgttcgagcctagcgaggccgagatcagccacacccagaaagccaccctcgtgtgcctggctaccggcttctaccccgaccatgtggaactgtcttggtgggtcaacggcaaagaggtgcacagcggcgtgtctaccgacccccagccactgaaagaacagcccgccctgaacgacagccggtactgcctgagcagcagactgagagtgtccgccaccttctggcagaacccccggaaccacttcagatgccaggtgcagttctacggcctgagcgagaacgacgagtggacccaggacagagccaagcccgtgacccagatcgtgtctgccgaagcctggggcagagccgattgcggatcccagagcttcggcctgctggaccccaagctgagctacctgctggatggcatcctgttcatctacggcgtgatcctgaccgccctgttcctgagagtgaagttcagcagaagcgccgacgcccctgcctaccagcagggacagaaccaactgtacaacgagctgaacctgggcagacgggaagagtacgacgtgctggacaagcggagaggcagggaccctgagatgggcggaaagccccagcggagaaagaacccccaggaaggactgtataacgaactccagaaagacaagatggccgaagcctacagcgagatcggcatgaagggcgagcggagaagaggcaagggccacgatggcctgtaccagggcctgagcaccgccaccaaggacacctatgacgccctgcacatgcaggccctgcctccaagaagggccaagcgatctggatctggagcaacaaacttctcactactcaaacaagcaggtgacgtggaggagaatcccgggcctactagtatggactggatttggcgcatccttttccttgtcggcgctgctaccggcgcgcattccttcgaagacggcgatagcgtgacccagacagagggactcgtgacactgaccgaaggactgcccgtgatgctgaactgcacctaccagacaatctacagcaaccccttcctgttttggtacgtgcagcacctgaacgagagccccagactgctgctgaagtccttcaccgacaacaagcggacagagcaccagggctttcacgccacactgcacaagagcagctccagcttccatctgcaaaagtctagcgcccagctgagcgacagcgccctgtactactgtgccttcgacaccaacacctacaaagtgatcttcggcaagggcacccatctgcacgtgctgcctaatacgcgtatccagaaccctgatcctgccgtgtaccagctgcgggatagcaagagcagcgacaagagcgtgtgtctgttcaccgacttcgacagccagaccaacgtgtcccagagcaaggactccgacgtgtacatcaccgataagaccgtgctggacatgcggagcatggacttcaagagcaactccgccgtggcctggtccaacaagtccgatttcgcctgcgccaacgccttcaacaacagcattatccccgaggacacattcttcccaagccccgagagcagctgcggtacccagagttttgggttgttggaccctaaattgagctatctgttggacggaatcctgttcatttacggagtgatcctgaccgcattgttcctgcgggttaagttttccagatccgcagacgcacccgcttaccaacaagggcagaaccaactctacaatgaacttaatttggggcggagggaagagtacgacgttctggacaaaaggaggggacgagatcccgagatgggcggaaagcctcagcgaaggaagaatccgcaagaggggctttataacgaactccagaaagataaaatggcagaagcctatagtgagattgggatgaagggagaaaggaggaggggtaaaggtcacgatgggttgtaccaaggattgagcacagccactaaagatacctatgatgcgctccacatgcaggccctgccgccaagataa

SEQ ID NO: 9487 - DNA, 2169 bp, Artificial Sequence
  Synthetic Polynucleotide
atggccttaccagtgaccgccttgctcctgccgctggccttgctgctccacgccgccaggccggaattcctggtggacatgaaagtgacccagatgcctcgctacctgattaagcggatgggcgagaacgtgctgctggaatgcggccaggatatgagccacgagacaatgtactggtacagacaggaccctggcctgggcctccagctgatctacatctcctacgacgtggacagcaacagcgagggcgacatccctaagggctacagagtgtcccggaagaagagagagcacttcagcctgatcctggacagcgccaagaccaaccagaccagcgtgtacttctgtgccagcagcagcaccaacaccgaggtgttctttggcaagggcaccagactgaccgtgctcctcgaggacctgaagaacgtgttcccacctgaggtggccgtgttcgagcctagcgaggccgagatcagccacacccagaaagccaccctcgtgtgcctggctaccggcttctaccccgaccatgtggaactgtcttggtgggtcaacggcaaagaggtgcacagcggcgtgtctaccgacccccagccactgaaagaacagcccgccctgaacgacagccggtactgcctgagcagcagactgagagtgtccgccaccttctggcagaacccccggaaccacttcagatgccaggtgcagttctacggcctgagcgagaacgacgagtggacccaggacagagccaagcccgtgacccagatcgtgtctgccgaagcctggggcagagccgattgcggatccacaacacctggcgagagaagtagcctgcctgccttctatcctggcaccagcggctcttgttctggctgtggatctctgagcctgcctctgctggctggactggttgctgctgatgctgtggcctctctgctgattgtgggagccgtgttcctgtgcgccagacctagaagaagccccgctcaagaggacggcaaggtgtacatcaacatgcccggcagaggaagggccaagcgatctggatctggagcaacaaacttctcactactcaaacaagcaggtgacgtggaggagaatcccgggcctactagtatggactggatttggcgcatccttttccttgtcggcgctgctaccggcgcgcattccttcgaagacggcgatagcgtgacccagacagagggactcgtgacactgaccgaaggactgcccgtgatgctgaactgcacctaccagacaatctacagcaaccccttcctgttttggtacgtgcagcacctgaacgagagccccagactgctgctgaagtccttcaccgacaacaagcggacagagcaccagggctttcacgccacactgcacaagagcagctccagcttccatctgcaaaagtctagcgcccagctgagcgacagcgccctgtactactgtgccttcgacaccaacacctacaaagtgatcttcggcaagggcacccatctgcacgtgctgcctaatacgcgtatccagaaccctgatcctgccgtgtaccagctgcgggatagcaagagcagcgacaagagcgtgtgtctgttcaccgacttcgacagccagaccaacgtgtcccagagcaaggactccgacgtgtacatcaccgataagaccgtgctggacatgcggagcatggacttcaagagcaactccgccgtggcctggtccaacaagtccgatttcgcctgcgccaacgccttcaacaacagcattatccccgaggacacattcttcccaagccccgagagcagctgcggtaccacaacacctggcgagagaagtagcctgcctgccttctatcctggcaccagcggctcttgttctggctgtggatctctgagcctgcctctgctggctggactggttgctgctgatgctgtggcctctctgctgattgtgggagccgtgttcaaacggggcagaaagaaactcctgtatatattcaaacaaccatttatgagaccagtacaaactactcaagaggaagatggctgtagctgccgatttccagaagaagaagaaggaggatgtgaactgctgtgcgccagacctagaagaagccccgctcaagaggacggcaaggtgtacatcaacatgcccggcagaggataa

SEQ ID NO: 9488 - DNA, 2166 bp, Artificial Sequence
  Synthetic Polynucleotide
atggccttaccagtgaccgccttgctcctgccgctggccttgctgctccacgccgccaggccggaattcctggtggacatgaaagtgacccagatgcctcgctacctgattaagcggatgggcgagaacgtgctgctggaatgcggccaggatatgagccacgagacaatgtactggtacagacaggaccctggcctgggcctccagctgatctacatctcctacgacgtggacagcaacagcgagggcgacatccctaagggctacagagtgtcccggaagaagagagagcacttcagcctgatcctggacagcgccaagaccaaccagaccagcgtgtacttctgtgccagcagcagcaccaacaccgaggtgttctttggcaagggcaccagactgaccgtgctcctcgaggacctgaagaacgtgttcccacctgaggtggccgtgttcgagcctagcgaggccgagatcagccacacccagaaagccaccctcgtgtgcctggctaccggcttctaccccgaccatgtggaactgtcttggtgggtcaacggcaaagaggtgcacagcggcgtgtctaccgacccccagccactgaaagaacagcccgccctgaacgacagccggtactgcctgagcagcagactgagagtgtccgccaccttctggcagaacccccggaaccacttcagatgccaggtgcagttctacggcctgagcgagaacgacgagtggacccaggacagagccaagcccgtgacccagatcgtgtctgccgaagcctggggcagagccgattgcggatccacaacacctggcgagagaagtagcctgcctgccttctatcctggcaccagcggctcttgttctggctgtggatctctgagcctgcctctgctggctggactggttgctgctgatgctgtggcctctctgctgattgtgggagccgtgttcctgtgcgccagacctagaagaagccccgctcaagaggacggcaaggtgtacatcaacatgcccggcagaggaagggccaagcgatctggatctggagcaacaaacttctcactactcaaacaagcaggtgacgtggaggagaatcccgggcctactagtatggactggatttggcgcatccttttccttgtcggcgctgctaccggcgcgcattccttcgaagacggcgatagcgtgacccagacagagggactcgtgacactgaccgaaggactgcccgtgatgctgaactgcacctaccagacaatctacagcaaccccttcctgttttggtacgtgcagcacctgaacgagagccccagactgctgctgaagtccttcaccgacaacaagcggacagagcaccagggctttcacgccacactgcacaagagcagctccagcttccatctgcaaaagtctagcgcccagctgagcgacagcgccctgtactactgtgccttcgacaccaacacctacaaagtgatcttcggcaagggcacccatctgcacgtgctgcctaatacgcgtatccagaaccctgatcctgccgtgtaccagctgcgggatagcaagagcagcgacaagagcgtgtgtctgttcaccgacttcgacagccagaccaacgtgtcccagagcaaggactccgacgtgtacatcaccgataagaccgtgctggacatgcggagcatggacttcaagagcaactccgccgtggcctggtccaacaagtccgatttcgcctgcgccaacgccttcaacaacagcattatccccgaggacacattcttcccaagccccgagagcagctgcggtaccacaacacctggcgagagaagtagcctgcctgccttctatcctggcaccagcggctcttgttctggctgtggatctctgagcctgcctctgctggctggactggttgctgctgatgctgtggcctctctgctgattgtgggagccgtgttcaggagtaagaggagcaggctcctgcacagtgactacatgaacatgactccacgccgccccggacccacccgcaagcattaccagccctatgccccaccacgcgacttcgcagcctatcgctccctgtgcgccagacctagaagaagccccgctcaagaggacggcaaggtgtacatcaacatgcccggcagaggataa

SEQ ID NO: 9489 - DNA, 2151 bp, Artificial Sequence
  Synthetic Polynucleotide
atggccttaccagtgaccgccttgctcctgccgctggccttgctgctccacgccgccaggccggaattcctggtggacatgaaagtgacccagatgcctcgctacctgattaagcggatgggcgagaacgtgctgctggaatgcggccaggatatgagccacgagacaatgtactggtacagacaggaccctggcctgggcctccagctgatctacatctcctacgacgtggacagcaacagcgagggcgacatccctaagggctacagagtgtcccggaagaagagagagcacttcagcctgatcctggacagcgccaagaccaaccagaccagcgtgtacttctgtgccagcagcagcaccaacaccgaggtgttctttggcaagggcaccagactgaccgtgctcctcgaggacctgaagaacgtgttcccacctgaggtggccgtgttcgagcctagcgaggccgagatcagccacacccagaaagccaccctcgtgtgcctggctaccggcttctaccccgaccatgtggaactgtcttggtgggtcaacggcaaagaggtgcacagcggcgtgtctaccgacccccagccactgaaagaacagcccgccctgaacgacagccggtactgcctgagcagcagactgagagtgtccgccaccttctggcagaacccccggaaccacttcagatgccaggtgcagttctacggcctgagcgagaacgacgagtggacccaggacagagccaagcccgtgacccagatcgtgtctgccgaagcctggggcagagccgattgcggatccacaacacctggcgagagaagtagcctgcctgccttctatcctggcaccagcggctcttgttctggctgtggatctctgagcctgcctctgctggctggactggttgctgctgatgctgtggcctctctgctgattgtgggagccgtgttcctgtgcgccagacctagaagaagccccgctcaagaggacggcaaggtgtacatcaacatgcccggcagaggaagggccaagcgatctggatctggagcaacaaacttctcactactcaaacaagcaggtgacgtggaggagaatcccgggcctactagtatggactggatttggcgcatccttttccttgtcggcgctgctaccggcgcgcattccttcgaagacggcgatagcgtgacccagacagagggactcgtgacactgaccgaaggactgcccgtgatgctgaactgcacctaccagacaatctacagcaaccccttcctgttttggtacgtgcagcacctgaacgagagccccagactgctgctgaagtccttcaccgacaacaagcggacagagcaccagggctttcacgccacactgcacaagagcagctccagcttccatctgcaaaagtctagcgcccagctgagcgacagcgccctgtactactgtgccttcgacaccaacacctacaaagtgatcttcggcaagggcacccatctgcacgtgctgcctaatacgcgtatccagaaccctgatcctgccgtgtaccagctgcgggatagcaagagcagcgacaagagcgtgtgtctgttcaccgacttcgacagccagaccaacgtgtcccagagcaaggactccgacgtgtacatcaccgataagaccgtgctggacatgcggagcatggacttcaagagcaactccgccgtggcctggtccaacaagtccgatttcgcctgcgccaacgccttcaacaacagcattatccccgaggacacattcttcccaagccccgagagcagctgcggtaccacaacacctggcgagagaagtagcctgcctgccttctatcctggcaccagcggctcttgttctggctgtggatctctgagcctgcctctgctggctggactggttgctgctgatgctgtggcctctctgctgattgtgggagccgtgttcagggaccaaagactgcctcctgacgctcacaaacctccaggcggaggcagcttcagaacccctatccaagaggaacaggctgacgcccacagcaccctggcaaaaattctgtgcgccagacctagaagaagccccgctcaagaggacggcaaggtgtacatcaacatgcccggcagaggataa

SEQ ID NO: 9490 - DNA, 2403 bp, Artificial Sequence
  Synthetic Polynucleotide
atggccttaccagtgaccgccttgctcctgccgctggccttgctgctccacgccgccaggccggaattcctggtggacatgaaagtgacccagatgcctcgctacctgattaagcggatgggcgagaacgtgctgctggaatgcggccaggatatgagccacgagacaatgtactggtacagacaggaccctggcctgggcctccagctgatctacatctcctacgacgtggacagcaacagcgagggcgacatccctaagggctacagagtgtcccggaagaagagagagcacttcagcctgatcctggacagcgccaagaccaaccagaccagcgtgtacttctgtgccagcagcagcaccaacaccgaggtgttctttggcaagggcaccagactgaccgtgctcctcgaggacctgaagaacgtgttcccacctgaggtggccgtgttcgagcctagcgaggccgagatcagccacacccagaaagccaccctcgtgtgcctggctaccggcttctaccccgaccatgtggaactgtcttggtgggtcaacggcaaagaggtgcacagcggcgtgtctaccgacccccagccactgaaagaacagcccgccctgaacgacagccggtactgcctgagcagcagactgagagtgtccgccaccttctggcagaacccccggaaccacttcagatgccaggtgcagttctacggcctgagcgagaacgacgagtggacccaggacagagccaagcccgtgacccagatcgtgtctgccgaagcctggggcagagccgattgcggatccacaacacctggcgagagaagtagcctgcctgccttctatcctggcaccagcggctcttgttctggctgtggatctctgagcctgcctctgctggctggactggttgctgctgatgctgtggcctctctgctgattgtgggagccgtgttcctgtgcgccagacctagaagaagccccgctcaagaggacggcaaggtgtacatcaacatgcccggcagaggaagggccaagcgatctggatctggagcaacaaacttctcactactcaaacaagcaggtgacgtggaggagaatcccgggcctactagtatggactggatttggcgcatccttttccttgtcggcgctgctaccggcgcgcattccttcgaagacggcgatagcgtgacccagacagagggactcgtgacactgaccgaaggactgcccgtgatgctgaactgcacctaccagacaatctacagcaaccccttcctgttttggtacgtgcagcacctgaacgagagccccagactgctgctgaagtccttcaccgacaacaagcggacagagcaccagggctttcacgccacactgcacaagagcagctccagcttccatctgcaaaagtctagcgcccagctgagcgacagcgccctgtactactgtgccttcgacaccaacacctacaaagtgatcttcggcaagggcacccatctgcacgtgctgcctaatacgcgtatccagaaccctgatcctgccgtgtaccagctgcgggatagcaagagcagcgacaagagcgtgtgtctgttcaccgacttcgacagccagaccaacgtgtcccagagcaaggactccgacgtgtacatcaccgataagaccgtgctggacatgcggagcatggacttcaagagcaactccgccgtggcctggtccaacaagtccgatttcgcctgcgccaacgccttcaacaacagcattatccccgaggacacattcttcccaagccccgagagcagctgcggtaccacaacacctggcgagagaagtagcctgcctgccttctatcctggcaccagcggctcttgttctggctgtggatctctgagcctgcctctgctggctggactggttgctgctgatgctgtggcctctctgctgattgtgggagccgtgttctggcggcggaagcggaaagagaagcagtctgagacaagccccaaagagttcctgaccatctacgaggacgtgaaggacctgaaaacccggcggaaccacgaacaagagcagacctttcctggcggaggcagcaccatctacagcatgatccagagccagagcagcgcccctacaagccaagagcctgcctacacactgtactccctgatccagcctagcagaaagagcggcagccggaagagaaatcacagccccagcttcaacagcacgatctacgaagtgatcggcaagagccagccaaaggctcagaaccctgccagactgagccggaaagagctggaaaacttcgacgtgtacagcctgtgcgccagacctagaagaagccccgctcaagaggacggcaaggtgtacatcaacatgcccggcagaggataa

SEQ ID NO: 9491 - DNA, 2256 bp, Artificial Sequence
  Synthetic Polynucleotide
atggccttaccagtgaccgccttgctcctgccgctggccttgctgctccacgccgccaggccggaattcctggtggacatgaaagtgacccagatgcctcgctacctgattaagcggatgggcgagaacgtgctgctggaatgcggccaggatatgagccacgagacaatgtactggtacagacaggaccctggcctgggcctccagctgatctacatctcctacgacgtggacagcaacagcgagggcgacatccctaagggctacagagtgtcccggaagaagagagagcacttcagcctgatcctggacagcgccaagaccaaccagaccagcgtgtacttctgtgccagcagcagcaccaacaccgaggtgttctttggcaagggcaccagactgaccgtgctcctcgaggacctgaagaacgtgttcccacctgaggtggccgtgttcgagcctagcgaggccgagatcagccacacccagaaagccaccctcgtgtgcctggctaccggcttctaccccgaccatgtggaactgtcttggtgggtcaacggcaaagaggtgcacagcggcgtgtctaccgacccccagccactgaaagaacagcccgccctgaacgacagccggtactgcctgagcagcagactgagagtgtccgccaccttctggcagaacccccggaaccacttcagatgccaggtgcagttctacggcctgagcgagaacgacgagtggacccaggacagagccaagcccgtgacccagatcgtgtctgccgaagcctggggcagagccgattgcggatccctgggagagcctcagctgtgctatatcctggacgccatcctgtttctgtacggcatcgtgctgaccctgctgtactgcaaacggggcagaaagaaactcctgtatatattcaaacaaccatttatgagaccagtacaaactactcaagaggaagatggctgtagctgccgatttccagaagaagaagaaggaggatgtgaactgcggctgaagatccaagtgcggaaggccgccatcaccagctacgagaaatccgacggcgtgtacaccggcctgagcaccagaaatcaagagacatacgagacactgaagcacgaaaagcctccacaaagggccaagcgatctggatctggagcaacaaacttctcactactcaaacaagcaggtgacgtggaggagaatcccgggcctactagtatggactggatttggcgcatccttttccttgtcggcgctgctaccggcgcgcattccttcgaagacggcgatagcgtgacccagacagagggactcgtgacactgaccgaaggactgcccgtgatgctgaactgcacctaccagacaatctacagcaaccccttcctgttttggtacgtgcagcacctgaacgagagccccagactgctgctgaagtccttcaccgacaacaagcggacagagcaccagggctttcacgccacactgcacaagagcagctccagcttccatctgcaaaagtctagcgcccagctgagcgacagcgccctgtactactgtgccttcgacaccaacacctacaaagtgatcttcggcaagggcacccatctgcacgtgctgcctaatacgcgtatccagaaccctgatcctgccgtgtaccagctgcgggatagcaagagcagcgacaagagcgtgtgtctgttcaccgacttcgacagccagaccaacgtgtcccagagcaaggactccgacgtgtacatcaccgataagaccgtgctggacatgcggagcatggacttcaagagcaactccgccgtggcctggtccaacaagtccgatttcgcctgcgccaacgccttcaacaacagcattatccccgaggacacattcttcccaagccccgagagcagctgcggtaccctgggagagcctcagctgtgctatatcctggacgccatcctgtttctgtacggcatcgtgctgaccctgctgtactgcaggagtaagaggagcaggctcctgcacagtgactacatgaacatgactccacgccgccccggacccacccgcaagcattaccagccctatgccccaccacgcgacttcgcagcctatcgctcccggctgaagatccaagtgcggaaggccgccatcaccagctacgagaaatccgacggcgtgtacaccggcctgagcaccagaaatcaagagacatacgagacactgaagcacgaaaagcctccacaataa

SEQ ID NO: 9492 - DNA, 2241 bp, Artificial Sequence
  Synthetic Polynucleotide
atggccttaccagtgaccgccttgctcctgccgctggccttgctgctccacgccgccaggccggaattcctggtggacatgaaagtgacccagatgcctcgctacctgattaagcggatgggcgagaacgtgctgctggaatgcggccaggatatgagccacgagacaatgtactggtacagacaggaccctggcctgggcctccagctgatctacatctcctacgacgtggacagcaacagcgagggcgacatccctaagggctacagagtgtcccggaagaagagagagcacttcagcctgatcctggacagcgccaagaccaaccagaccagcgtgtacttctgtgccagcagcagcaccaacaccgaggtgttctttggcaagggcaccagactgaccgtgctcctcgaggacctgaagaacgtgttcccacctgaggtggccgtgttcgagcctagcgaggccgagatcagccacacccagaaagccaccctcgtgtgcctggctaccggcttctaccccgaccatgtggaactgtcttggtgggtcaacggcaaagaggtgcacagcggcgtgtctaccgacccccagccactgaaagaacagcccgccctgaacgacagccggtactgcctgagcagcagactgagagtgtccgccaccttctggcagaacccccggaaccacttcagatgccaggtgcagttctacggcctgagcgagaacgacgagtggacccaggacagagccaagcccgtgacccagatcgtgtctgccgaagcctggggcagagccgattgcggatccctgggagagcctcagctgtgctatatcctggacgccatcctgtttctgtacggcatcgtgctgaccctgctgtactgcaaacggggcagaaagaaactcctgtatatattcaaacaaccatttatgagaccagtacaaactactcaagaggaagatggctgtagctgccgatttccagaagaagaagaaggaggatgtgaactgcggctgaagatccaagtgcggaaggccgccatcaccagctacgagaaatccgacggcgtgtacaccggcctgagcaccagaaatcaagagacatacgagacactgaagcacgaaaagcctccacaaagggccaagcgatctggatctggagcaacaaacttctcactactcaaacaagcaggtgacgtggaggagaatcccgggcctactagtatggactggatttggcgcatccttttccttgtcggcgctgctaccggcgcgcattccttcgaagacggcgatagcgtgacccagacagagggactcgtgacactgaccgaaggactgcccgtgatgctgaactgcacctaccagacaatctacagcaaccccttcctgttttggtacgtgcagcacctgaacgagagccccagactgctgctgaagtccttcaccgacaacaagcggacagagcaccagggctttcacgccacactgcacaagagcagctccagcttccatctgcaaaagtctagcgcccagctgagcgacagcgccctgtactactgtgccttcgacaccaacacctacaaagtgatcttcggcaagggcacccatctgcacgtgctgcctaatacgcgtatccagaaccctgatcctgccgtgtaccagctgcgggatagcaagagcagcgacaagagcgtgtgtctgttcaccgacttcgacagccagaccaacgtgtcccagagcaaggactccgacgtgtacatcaccgataagaccgtgctggacatgcggagcatggacttcaagagcaactccgccgtggcctggtccaacaagtccgatttcgcctgcgccaacgccttcaacaacagcattatccccgaggacacattcttcccaagccccgagagcagctgcggtaccctgggagagcctcagctgtgctatatcctggacgccatcctgtttctgtacggcatcgtgctgaccctgctgtactgcagggaccaaagactgcctcctgacgctcacaaacctccaggcggaggcagcttcagaacccctatccaagaggaacaggctgacgcccacagcaccctggcaaaaattcggctgaagatccaagtgcggaaggccgccatcaccagctacgagaaatccgacggcgtgtacaccggcctgagcaccagaaatcaagagacatacgagacactgaagcacgaaaagcctccacaataa

SEQ ID NO: 9493 - DNA, 2493 bp, Artificial Sequence
  Synthetic Polynucleotide
atggccttaccagtgaccgccttgctcctgccgctggccttgctgctccacgccgccaggccggaattcctggtggacatgaaagtgacccagatgcctcgctacctgattaagcggatgggcgagaacgtgctgctggaatgcggccaggatatgagccacgagacaatgtactggtacagacaggaccctggcctgggcctccagctgatctacatctcctacgacgtggacagcaacagcgagggcgacatccctaagggctacagagtgtcccggaagaagagagagcacttcagcctgatcctggacagcgccaagaccaaccagaccagcgtgtacttctgtgccagcagcagcaccaacaccgaggtgttctttggcaagggcaccagactgaccgtgctcctcgaggacctgaagaacgtgttcccacctgaggtggccgtgttcgagcctagcgaggccgagatcagccacacccagaaagccaccctcgtgtgcctggctaccggcttctaccccgaccatgtggaactgtcttggtgggtcaacggcaaagaggtgcacagcggcgtgtctaccgacccccagccactgaaagaacagcccgccctgaacgacagccggtactgcctgagcagcagactgagagtgtccgccaccttctggcagaacccccggaaccacttcagatgccaggtgcagttctacggcctgagcgagaacgacgagtggacccaggacagagccaagcccgtgacccagatcgtgtctgccgaagcctggggcagagccgattgcggatccctgggagagcctcagctgtgctatatcctggacgccatcctgtttctgtacggcatcgtgctgaccctgctgtactgcaaacggggcagaaagaaactcctgtatatattcaaacaaccatttatgagaccagtacaaactactcaagaggaagatggctgtagctgccgatttccagaagaagaagaaggaggatgtgaactgcggctgaagatccaagtgcggaaggccgccatcaccagctacgagaaatccgacggcgtgtacaccggcctgagcaccagaaatcaagagacatacgagacactgaagcacgaaaagcctccacaaagggccaagcgatctggatctggagcaacaaacttctcactactcaaacaagcaggtgacgtggaggagaatcccgggcctactagtatggactggatttggcgcatccttttccttgtcggcgctgctaccggcgcgcattccttcgaagacggcgatagcgtgacccagacagagggactcgtgacactgaccgaaggactgcccgtgatgctgaactgcacctaccagacaatctacagcaaccccttcctgttttggtacgtgcagcacctgaacgagagccccagactgctgctgaagtccttcaccgacaacaagcggacagagcaccagggctttcacgccacactgcacaagagcagctccagcttccatctgcaaaagtctagcgcccagctgagcgacagcgccctgtactactgtgccttcgacaccaacacctacaaagtgatcttcggcaagggcacccatctgcacgtgctgcctaatacgcgtatccagaaccctgatcctgccgtgtaccagctgcgggatagcaagagcagcgacaagagcgtgtgtctgttcaccgacttcgacagccagaccaacgtgtcccagagcaaggactccgacgtgtacatcaccgataagaccgtgctggacatgcggagcatggacttcaagagcaactccgccgtggcctggtccaacaagtccgatttcgcctgcgccaacgccttcaacaacagcattatccccgaggacacattcttcccaagccccgagagcagctgcggtaccctgggagagcctcagctgtgctatatcctggacgccatcctgtttctgtacggcatcgtgctgaccctgctgtactgctggcggcggaagcggaaagagaagcagtctgagacaagccccaaagagttcctgaccatctacgaggacgtgaaggacctgaaaacccggcggaaccacgaacaagagcagacctttcctggcggaggcagcaccatctacagcatgatccagagccagagcagcgcccctacaagccaagagcctgcctacacactgtactccctgatccagcctagcagaaagagcggcagccggaagagaaatcacagccccagcttcaacagcacgatctacgaagtgatcggcaagagccagccaaaggctcagaaccctgccagactgagccggaaagagctggaaaacttcgacgtgtacagccggctgaagatccaagtgcggaaggccgccatcaccagctacgagaaatccgacggcgtgtacaccggcctgagcaccagaaatcaagagacatacgagacactgaagcacgaaaagcctccacaataa

SEQ ID NO: 9494 - DNA, 2259 bp, Artificial Sequence
  Synthetic Polynucleotide
atggccttaccagtgaccgccttgctcctgccgctggccttgctgctccacgccgccaggccggaattcctggtggacatgaaagtgacccagatgcctcgctacctgattaagcggatgggcgagaacgtgctgctggaatgcggccaggatatgagccacgagacaatgtactggtacagacaggaccctggcctgggcctccagctgatctacatctcctacgacgtggacagcaacagcgagggcgacatccctaagggctacagagtgtcccggaagaagagagagcacttcagcctgatcctggacagcgccaagaccaaccagaccagcgtgtacttctgtgccagcagcagcaccaacaccgaggtgttctttggcaagggcaccagactgaccgtgctcctcgaggacctgaagaacgtgttcccacctgaggtggccgtgttcgagcctagcgaggccgagatcagccacacccagaaagccaccctcgtgtgcctggctaccggcttctaccccgaccatgtggaactgtcttggtgggtcaacggcaaagaggtgcacagcggcgtgtctaccgacccccagccactgaaagaacagcccgccctgaacgacagccggtactgcctgagcagcagactgagagtgtccgccaccttctggcagaacccccggaaccacttcagatgccaggtgcagttctacggcctgagcgagaacgacgagtggacccaggacagagccaagcccgtgacccagatcgtgtctgccgaagcctggggcagagccgattgcggatccctgggagagcctcagctgtgctatatcctggacgccatcctgtttctgtacggcatcgtgctgaccctgctgtactgcaaacggggcagaaagaaactcctgtatatattcaaacaaccatttatgagaccagtacaaactactcaagaggaagatggctgtagctgccgatttccagaagaagaagaaggaggatgtgaactgcggctgaagatccaagtgcggaaggccgccatcaccagctacgagaaatccgacggcgtgtacaccggcctgagcaccagaaatcaagagacatacgagacactgaagcacgaaaagcctccacaaagggccaagcgatctggatctggagcaacaaacttctcactactcaaacaagcaggtgacgtggaggagaatcccgggcctactagtatggactggatttggcgcatccttttccttgtcggcgctgctaccggcgcgcattccttcgaagacggcgatagcgtgacccagacagagggactcgtgacactgaccgaaggactgcccgtgatgctgaactgcacctaccagacaatctacagcaaccccttcctgttttggtacgtgcagcacctgaacgagagccccagactgctgctgaagtccttcaccgacaacaagcggacagagcaccagggctttcacgccacactgcacaagagcagctccagcttccatctgcaaaagtctagcgcccagctgagcgacagcgccctgtactactgtgccttcgacaccaacacctacaaagtgatcttcggcaagggcacccatctgcacgtgctgcctaatacgcgtatccagaaccctgatcctgccgtgtaccagctgcgggatagcaagagcagcgacaagagcgtgtgtctgttcaccgacttcgacagccagaccaacgtgtcccagagcaaggactccgacgtgtacatcaccgataagaccgtgctggacatgcggagcatggacttcaagagcaactccgccgtggcctggtccaacaagtccgatttcgcctgcgccaacgccttcaacaacagcattatccccgaggacacattcttcccaagccccgagagcagctgcggtaccctcggagaaccacagctctgttacattctggatgctatcctgttcctctatgggatcgtcctgacactcctgtattgcaagagaggccggaagaagctgctgtacatcttcaagcagcctttcatgcggcccgtgcagaccacccaggaagaggacggctgctcctgccggttccccgaggaagaagaaggcggctgcgagctgagactcaaaattcaagttcgcaaagccgccattacctcttacgagaagagtgatggggtgtacacaggactgtctacccggaatcaagaaacctacgaaaccctcaaacatgagaagccacctcagtaa

SEQ ID NO: 9495 - DNA, 2256 bp, Artificial Sequence
  Synthetic Polynucleotide
atggccttaccagtgaccgccttgctcctgccgctggccttgctgctccacgccgccaggccggaattcctggtggacatgaaagtgacccagatgcctcgctacctgattaagcggatgggcgagaacgtgctgctggaatgcggccaggatatgagccacgagacaatgtactggtacagacaggaccctggcctgggcctccagctgatctacatctcctacgacgtggacagcaacagcgagggcgacatccctaagggctacagagtgtcccggaagaagagagagcacttcagcctgatcctggacagcgccaagaccaaccagaccagcgtgtacttctgtgccagcagcagcaccaacaccgaggtgttctttggcaagggcaccagactgaccgtgctcctcgaggacctgaagaacgtgttcccacctgaggtggccgtgttcgagcctagcgaggccgagatcagccacacccagaaagccaccctcgtgtgcctggctaccggcttctaccccgaccatgtggaactgtcttggtgggtcaacggcaaagaggtgcacagcggcgtgtctaccgacccccagccactgaaagaacagcccgccctgaacgacagccggtactgcctgagcagcagactgagagtgtccgccaccttctggcagaacccccggaaccacttcagatgccaggtgcagttctacggcctgagcgagaacgacgagtggacccaggacagagccaagcccgtgacccagatcgtgtctgccgaagcctggggcagagccgattgcggatccctgggagagcctcagctgtgctatatcctggacgccatcctgtttctgtacggcatcgtgctgaccctgctgtactgcaaacggggcagaaagaaactcctgtatatattcaaacaaccatttatgagaccagtacaaactactcaagaggaagatggctgtagctgccgatttccagaagaagaagaaggaggatgtgaactgcggctgaagatccaagtgcggaaggccgccatcaccagctacgagaaatccgacggcgtgtacaccggcctgagcaccagaaatcaagagacatacgagacactgaagcacgaaaagcctccacaaagggccaagcgatctggatctggagcaacaaacttctcactactcaaacaagcaggtgacgtggaggagaatcccgggcctactagtatggactggatttggcgcatccttttccttgtcggcgctgctaccggcgcgcattccttcgaagacggcgatagcgtgacccagacagagggactcgtgacactgaccgaaggactgcccgtgatgctgaactgcacctaccagacaatctacagcaaccccttcctgttttggtacgtgcagcacctgaacgagagccccagactgctgctgaagtccttcaccgacaacaagcggacagagcaccagggctttcacgccacactgcacaagagcagctccagcttccatctgcaaaagtctagcgcccagctgagcgacagcgccctgtactactgtgccttcgacaccaacacctacaaagtgatcttcggcaagggcacccatctgcacgtgctgcctaatacgcgtatccagaaccctgatcctgccgtgtaccagctgcgggatagcaagagcagcgacaagagcgtgtgtctgttcaccgacttcgacagccagaccaacgtgtcccagagcaaggactccgacgtgtacatcaccgataagaccgtgctggacatgcggagcatggacttcaagagcaactccgccgtggcctggtccaacaagtccgatttcgcctgcgccaacgccttcaacaacagcattatccccgaggacacattcttcccaagccccgagagcagctgcggtaccctcggagaaccacagctctgttacattctggatgctatcctgttcctctatgggatcgtcctgacactcctgtattgcaggagcaagcggtcacggctgctccacagcgattacatgaatatgacaccacgaagaccgggtcctactcgcaaacactaccaaccctacgcacctccccgcgactttgcagcgtaccgatctagactcaaaattcaagttcgcaaagccgccattacctcttacgagaagagtgatggggtgtacacaggactgtctacccggaatcaagaaacctacgaaaccctcaaacatgagaagccacctcagtaa

SEQ ID NO: 9496 - DNA, 2253 bp, Artificial Sequence
  Synthetic Polynucleotide
atggccttaccagtgaccgccttgctcctgccgctggccttgctgctccacgccgccaggccggaattcctggtggacatgaaagtgacccagatgcctcgctacctgattaagcggatgggcgagaacgtgctgctggaatgcggccaggatatgagccacgagacaatgtactggtacagacaggaccctggcctgggcctccagctgatctacatctcctacgacgtggacagcaacagcgagggcgacatccctaagggctacagagtgtcccggaagaagagagagcacttcagcctgatcctggacagcgccaagaccaaccagaccagcgtgtacttctgtgccagcagcagcaccaacaccgaggtgttctttggcaagggcaccagactgaccgtgctcctcgaggacctgaagaacgtgttcccacctgaggtggccgtgttcgagcctagcgaggccgagatcagccacacccagaaagccaccctcgtgtgcctggctaccggcttctaccccgaccatgtggaactgtcttggtgggtcaacggcaaagaggtgcacagcggcgtgtctaccgacccccagccactgaaagaacagcccgccctgaacgacagccggtactgcctgagcagcagactgagagtgtccgccaccttctggcagaacccccggaaccacttcagatgccaggtgcagttctacggcctgagcgagaacgacgagtggacccaggacagagccaagcccgtgacccagatcgtgtctgccgaagcctggggcagagccgattgcggatccctgggagagcctcagctgtgctatatcctggacgccatcctgtttctgtacggcatcgtgctgaccctgctgtactgcaggagtaagaggagcaggctcctgcacagtgactacatgaacatgactccacgccgccccggacccacccgcaagcattaccagccctatgccccaccacgcgacttcgcagcctatcgctcccggctgaagatccaagtgcggaaggccgccatcaccagctacgagaaatccgacggcgtgtacaccggcctgagcaccagaaatcaagagacatacgagacactgaagcacgaaaagcctccacaaagggccaagcgatctggatctggagcaacaaacttctcactactcaaacaagcaggtgacgtggaggagaatcccgggcctactagtatggactggatttggcgcatccttttccttgtcggcgctgctaccggcgcgcattccttcgaagacggcgatagcgtgacccagacagagggactcgtgacactgaccgaaggactgcccgtgatgctgaactgcacctaccagacaatctacagcaaccccttcctgttttggtacgtgcagcacctgaacgagagccccagactgctgctgaagtccttcaccgacaacaagcggacagagcaccagggctttcacgccacactgcacaagagcagctccagcttccatctgcaaaagtctagcgcccagctgagcgacagcgccctgtactactgtgccttcgacaccaacacctacaaagtgatcttcggcaagggcacccatctgcacgtgctgcctaatacgcgtatccagaaccctgatcctgccgtgtaccagctgcgggatagcaagagcagcgacaagagcgtgtgtctgttcaccgacttcgacagccagaccaacgtgtcccagagcaaggactccgacgtgtacatcaccgataagaccgtgctggacatgcggagcatggacttcaagagcaactccgccgtggcctggtccaacaagtccgatttcgcctgcgccaacgccttcaacaacagcattatccccgaggacacattcttcccaagccccgagagcagctgcggtaccctcggagaaccacagctctgttacattctggatgctatcctgttcctctatgggatcgtcctgacactcctgtattgcaggagcaagcggtcacggctgctccacagcgattacatgaatatgacaccacgaagaccgggtcctactcgcaaacactaccaaccctacgcacctccccgcgactttgcagcgtaccgatctagactcaaaattcaagttcgcaaagccgccattacctcttacgagaagagtgatggggtgtacacaggactgtctacccggaatcaagaaacctacgaaaccctcaaacatgagaagccacctcagtaa

SEQ ID NO: 9497 - DNA, 2007 bp, Artificial Sequence
  Synthetic Polynucleotide
atggccttaccagtgaccgccttgctcctgccgctggccttgctgctccacgccgccaggccggaattcctggtggacatgaaagtgacccagatgcctcgctacctgattaagcggatgggcgagaacgtgctgctggaatgcggccaggatatgagccacgagacaatgtactggtacagacaggaccctggcctgggcctccagctgatctacatctcctacgacgtggacagcaacagcgagggcgacatccctaagggctacagagtgtcccggaagaagagagagcacttcagcctgatcctggacagcgccaagaccaaccagaccagcgtgtacttctgtgccagcagcagcaccaacaccgaggtgttctttggcaagggcaccagactgaccgtgctcctcgaggacctgaagaacgtgttcccacctgaggtggccgtgttcgagcctagcgaggccgagatcagccacacccagaaagccaccctcgtgtgcctggctaccggcttctaccccgaccatgtggaactgtcttggtgggtcaacggcaaagaggtgcacagcggcgtgtctaccgacccccagccactgaaagaacagcccgccctgaacgacagccggtactgcctgagcagcagactgagagtgtccgccaccttctggcagaacccccggaaccacttcagatgccaggtgcagttctacggcctgagcgagaacgacgagtggacccaggacagagccaagcccgtgacccagatcgtgtctgccgaagcctggggcagagccgattgcggatccctgggagagcctcagctgagctatatcctggacgccatcctgtttctgtacggcatcgtgctgaccctgctgtactgccggctgaagatccaagtgcggaaggccgccatcaccagctacgagaaatccgacggcgtgtacaccggcctgagcaccagaaatcaagagacatacgagacactgaagcacgaaaagcctccacaaagggccaagcgatctggatctggagcaacaaacttctcactactcaaacaagcaggtgacgtggaggagaatcccgggcctactagtatggactggatttggcgcatccttttccttgtcggcgctgctaccggcgcgcattccttcgaagacggcgatagcgtgacccagacagagggactcgtgacactgaccgaaggactgcccgtgatgctgaactgcacctaccagacaatctacagcaaccccttcctgttttggtacgtgcagcacctgaacgagagccccagactgctgctgaagtccttcaccgacaacaagcggacagagcaccagggctttcacgccacactgcacaagagcagctccagcttccatctgcaaaagtctagcgcccagctgagcgacagcgccctgtactactgtgccttcgacaccaacacctacaaagtgatcttcggcaagggcacccatctgcacgtgctgcctaatacgcgtatccagaaccctgatcctgccgtgtaccagctgcgggatagcaagagcagcgacaagagcgtgtgtctgttcaccgacttcgacagccagaccaacgtgtcccagagcaaggactccgacgtgtacatcaccgataagaccgtgctggacatgcggagcatggacttcaagagcaactccgccgtggcctggtccaacaagtccgatttcgcctgcgccaacgccttcaacaacagcattatccccgaggacacattcttcccaagccccgagagcagctgcggtaccctcggagaaccacagctctcttacattctggatgctatcctgttcctctatgggatcgtcctgacactcctgtattgcagactcaaaattcaagttcgcaaagccgccattacctcttacgagaagagtgatggggtgtacacaggactgtctacccggaatcaagaaacctacgaaaccctcaaacatgagaagccacctcagtaa

SEQ ID NO: 9498 - DNA, 2115 bp, Artificial Sequence
  Synthetic Polynucleotide
atggccttaccagtgaccgccttgctcctgccgctggccttgctgctccacgccgccaggccggaattcctggtggacatgaaagtgacccagatgcctcgctacctgattaagcggatgggcgagaacgtgctgctggaatgcggccaggatatgagccacgagacaatgtactggtacagacaggaccctggcctgggcctccagctgatctacatctcctacgacgtggacagcaacagcgagggcgacatccctaagggctacagagtgtcccggaagaagagagagcacttcagcctgatcctggacagcgccaagaccaaccagaccagcgtgtacttctgtgccagcagcagcaccaacaccgaggtgttctttggcaagggcaccagactgaccgtgctcctcgaggacctgaagaacgtgttcccacctgaggtggccgtgttcgagcctagcgaggccgagatcagccacacccagaaagccaccctcgtgtgcctggctaccggcttctaccccgaccatgtggaactgtcttggtgggtcaacggcaaagaggtgcacagcggcgtgtctaccgacccccagccactgaaagaacagcccgccctgaacgacagccggtactgcctgagcagcagactgagagtgtccgccaccttctggcagaacccccggaaccacttcagatgccaggtgcagttctacggcctgagcgagaacgacgagtggacccaggacagagccaagcccgtgacccagatcgtgtctgccgaagcctggggcagagccgattgcggatcccaggctcagagcgattgcagctgtagcacagtgtctccaggcgtgctggccggaattgtgatgggcgatctggtgctgacagtgctgattgccctggccgtgtacttcctgggtagactggtgcctagaggaagaggcgctgccgaagccgccacaagaaagcagagaatcaccgagacagagagcccctaccaagagctgcaaggccagagaagcgacgtgtacagcgacctgaatacccagcggccttactacaaaagggccaagcgatctggatctggagcaacaaacttctcactactcaaacaagcaggtgacgtggaggagaatcccgggcctactagtatggactggatttggcgcatccttttccttgtcggcgctgctaccggcgcgcattccttcgaagacggcgatagcgtgacccagacagagggactcgtgacactgaccgaaggactgcccgtgatgctgaactgcacctaccagacaatctacagcaaccccttcctgttttggtacgtgcagcacctgaacgagagccccagactgctgctgaagtccttcaccgacaacaagcggacagagcaccagggctttcacgccacactgcacaagagcagctccagcttccatctgcaaaagtctagcgcccagctgagcgacagcgccctgtactactgtgccttcgacaccaacacctacaaagtgatcttcggcaagggcacccatctgcacgtgctgcctaatacgcgtatccagaaccctgatcctgccgtgtaccagctgcgggatagcaagagcagcgacaagagcgtgtgtctgttcaccgacttcgacagccagaccaacgtgtcccagagcaaggactccgacgtgtacatcaccgataagaccgtgctggacatgcggagcatggacttcaagagcaactccgccgtggcctggtccaacaagtccgatttcgcctgcgccaacgccttcaacaacagcattatccccgaggacacattcttcccaagccccgagagcagctgcggtacccaggctcagagcgattgcagctctagcacagtgtctccaggcgtgctggccggaattgtgatgggcgatctggtgctgacagtgctgattgccctggccgtgtacttcctgggtagactggtgcctagaggaagaggcgctgccgaagccgccacaagaaagcagagaatcaccgagacagagagcccctaccaagagctgcaaggccagagaagcgacgtgtacagcgacctgaatacccagcggccttactacaaataa

SEQ ID NO: 9499 - DNA, 2241 bp, Artificial Sequence
  Synthetic Polynucleotide
atggccttaccagtgaccgccttgctcctgccgctggccttgctgctccacgccgccaggccggaattcctggtggacatgaaagtgacccagatgcctcgctacctgattaagcggatgggcgagaacgtgctgctggaatgcggccaggatatgagccacgagacaatgtactggtacagacaggaccctggcctgggcctccagctgatctacatctcctacgacgtggacagcaacagcgagggcgacatccctaagggctacagagtgtcccggaagaagagagagcacttcagcctgatcctggacagcgccaagaccaaccagaccagcgtgtacttctgtgccagcagcagcaccaacaccgaggtgttctttggcaagggcaccagactgaccgtgctcctcgaggacctgaagaacgtgttcccacctgaggtggccgtgttcgagcctagcgaggccgagatcagccacacccagaaagccaccctcgtgtgcctggctaccggcttctaccccgaccatgtggaactgtcttggtgggtcaacggcaaagaggtgcacagcggcgtgtctaccgacccccagccactgaaagaacagcccgccctgaacgacagccggtactgcctgagcagcagactgagagtgtccgccaccttctggcagaacccccggaaccacttcagatgccaggtgcagttctacggcctgagcgagaacgacgagtggacccaggacagagccaagcccgtgacccagatcgtgtctgccgaagcctggggcagagccgattgcggatcccaggctcagagcgattgcagctgtagcacagtgtctccaggcgtgctggccggaattgtgatgggcgatctggtgctgacagtgctgattgccctggccgtgtacttcctgggtagactggtgcctagaggaagaggcgctgccgaagccgccacaagaaagcagagaatcaccgagacagagagcccctaccaagagctgcaaggccagagaagcgacgtgtacagcgacctgaatacccagcggccttactacaaaagggccaagcgatctggatctggagcaacaaacttctcactactcaaacaagcaggtgacgtggaggagaatcccgggcctactagtatggactggatttggcgcatccttttccttgtcggcgctgctaccggcgcgcattccttcgaagacggcgatagcgtgacccagacagagggactcgtgacactgaccgaaggactgcccgtgatgctgaactgcacctaccagacaatctacagcaaccccttcctgttttggtacgtgcagcacctgaacgagagccccagactgctgctgaagtccttcaccgacaacaagcggacagagcaccagggctttcacgccacactgcacaagagcagctccagcttccatctgcaaaagtctagcgcccagctgagcgacagcgccctgtactactgtgccttcgacaccaacacctacaaagtgatcttcggcaagggcacccatctgcacgtgctgcctaatacgcgtatccagaaccctgatcctgccgtgtaccagctgcgggatagcaagagcagcgacaagagcgtgtgtctgttcaccgacttcgacagccagaccaacgtgtcccagagcaaggactccgacgtgtacatcaccgataagaccgtgctggacatgcggagcatggacttcaagagcaactccgccgtggcctggtccaacaagtccgatttcgcctgcgccaacgccttcaacaacagcattatccccgaggacacattcttcccaagccccgagagcagctgcggtacccaggctcagagcgattgcagctgtagcacagtgtctccaggcgtgctggccggaattgtgatgggcgatctggtgctgacagtgctgattgccctggccgtgtacttcctgggtagactggtgcctagaggaagaggcgctgccgaagccgccacaagaaagcagagaatcaccgagacagagagcccctaccaagagctgcaaggccagagaagcgacgtgtacagcgacctgaatacccagaaacggggcagaaagaaactcctgtatatattcaaacaaccatttatgagaccagtacaaactactcaagaggaagatggctgtagctgccgatttccagaagaagaagaaggaggatgtgaactgcggccttactacaaataa

SEQ ID NO: 9500 - DNA, 2238 bp, Artificial Sequence
  Synthetic Polynucleotide
atggccttaccagtgaccgccttgctcctgccgctggccttgctgctccacgccgccaggccggaattcctggtggacatgaaagtgacccagatgcctcgctacctgattaagcggatgggcgagaacgtgctgctggaatgcggccaggatatgagccacgagacaatgtactggtacagacaggaccctggcctgggcctccagctgatctacatctcctacgacgtggacagcaacagcgagggcgacatccctaagggctacagagtgtcccggaagaagagagagcacttcagcctgatcctggacagcgccaagaccaaccagaccagcgtgtacttctgtgccagcagcagcaccaacaccgaggtgttctttggcaagggcaccagactgaccgtgctcctcgaggacctgaagaacgtgttcccacctgaggtggccgtgttcgagcctagcgaggccgagatcagccacacccagaaagccaccctcgtgtgcctggctaccggcttctaccccgaccatgtggaactgtcttggtgggtcaacggcaaagaggtgcacagcggcgtgtctaccgacccccagccactgaaagaacagcccgccctgaacgacagccggtactgcctgagcagcagactgagagtgtccgccaccttctggcagaacccccggaaccacttcagatgccaggtgcagttctacggcctgagcgagaacgacgagtggacccaggacagagccaagcccgtgacccagatcgtgtctgccgaagcctggggcagagccgattgcggatcccaggctcagagcgattgcagctgtagcacagtgtctccaggcgtgctggccggaattgtgatgggcgatctggtgctgacagtgctgattgccctggccgtgtacttcctgggtagactggtgcctagaggaagaggcgctgccgaagccgccacaagaaagcagagaatcaccgagacagagagcccctaccaagagctgcaaggccagagaagcgacgtgtacagcgacctgaatacccagcggccttactacaaaagggccaagcgatctggatctggagcaacaaacttctcactactcaaacaagcaggtgacgtggaggagaatcccgggcctactagtatggactggatttggcgcatccttttccttgtcggcgctgctaccggcgcgcattccttcgaagacggcgatagcgtgacccagacagagggactcgtgacactgaccgaaggactgcccgtgatgctgaactgcacctaccagacaatctacagcaaccccttcctgttttggtacgtgcagcacctgaacgagagccccagactgctgctgaagtccttcaccgacaacaagcggacagagcaccagggctttcacgccacactgcacaagagcagctccagcttccatctgcaaaagtctagcgcccagctgagcgacagcgccctgtactactgtgccttcgacaccaacacctacaaagtgatcttcggcaagggcacccatctgcacgtgctgcctaatacgcgtatccagaaccctgatcctgccgtgtaccagctgcgggatagcaagagcagcgacaagagcgtgtgtctgttcaccgacttcgacagccagaccaacgtgtcccagagcaaggactccgacgtgtacatcaccgataagaccgtgctggacatgcggagcatggacttcaagagcaactccgccgtggcctggtccaacaagtccgatttcgcctgcgccaacgccttcaacaacagcattatccccgaggacacattcttcccaagccccgagagcagctgcggtacccaggctcagagcgattgcagctgtagcacagtgtctccaggcgtgctggccggaattgtgatgggcgatctggtgctgacagtgctgattgccctggccgtgtacttcctgggtagactggtgcctagaggaagaggcgctgccgaagccgccacaagaaagcagagaatcaccgagacagagagcccctaccaagagctgcaaggccagagaagcgacgtgtacagcgacctgaatacccagaggagcaagcggtcacggctgctccacagcgattacatgaatatgacaccacgaagaccgggtcctactcgcaaacactaccaaccctacgcacctccccgcgactttgcagcgtaccgatctcggccttactacaaataa

SEQ ID NO: 9501 - DNA, 2223 bp, Artificial Sequence
  Synthetic Polynucleotide
atggccttaccagtgaccgccttgctcctgccgctggccttgctgctccacgccgccaggccggaattcctggtggacatgaaagtgacccagatgcctcgctacctgattaagcggatgggcgagaacgtgctgctggaatgcggccaggatatgagccacgagacaatgtactggtacagacaggaccctggcctgggcctccagctgatctacatctcctacgacgtggacagcaacagcgagggcgacatccctaagggctacagagtgtcccggaagaagagagagcacttcagcctgatcctggacagcgccaagaccaaccagaccagcgtgtacttctgtgccagcagcagcaccaacaccgaggtgttctttggcaagggcaccagactgaccgtgctcctcgaggacctgaagaacgtgttcccacctgaggtggccgtgttcgagcctagcgaggccgagatcagccacacccagaaagccaccctcgtgtgcctggctaccggcttctaccccgaccatgtggaactgtcttggtgggtcaacggcaaagaggtgcacagcggcgtgtctaccgacccccagccactgaaagaacagcccgccctgaacgacagccggtactgcctgagcagcagactgagagtgtccgccaccttctggcagaacccccggaaccacttcagatgccaggtgcagttctacggcctgagcgagaacgacgagtggacccaggacagagccaagcccgtgacccagatcgtgtctgccgaagcctggggcagagccgattgcggatcccaggctcagagcgattgcagctgtagcacagtgtctccaggcgtgctggccggaattgtgatgggcgatctggtgctgacagtgctgattgccctggccgtgtacttcctgggtagactggtgcctagaggaagaggcgctgccgaagccgccacaagaaagcagagaatcaccgagacagagagcccctaccaagagctgcaaggccagagaagcgacgtgtacagcgacctgaatacccagcggccttactacaaaagggccaagcgatctggatctggagcaacaaacttctcactactcaaacaagcaggtgacgtggaggagaatcccgggcctactagtatggactggatttggcgcatccttttccttgtcggcgctgctaccggcgcgcattccttcgaagacggcgatagcgtgacccagacagagggactcgtgacactgaccgaaggactgcccgtgatgctgaactgcacctaccagacaatctacagcaaccccttcctgttttggtacgtgcagcacctgaacgagagccccagactgctgctgaagtccttcaccgacaacaagcggacagagcaccagggctttcacgccacactgcacaagagcagctccagcttccatctgcaaaagtctagcgcccagctgagcgacagcgccctgtactactgtgccttcgacaccaacacctacaaagtgatcttcggcaagggcacccatctgcacgtgctgcctaatacgcgtatccagaaccctgatcctgccgtgtaccagctgcgggatagcaagagcagcgacaagagcgtgtgtctgttcaccgacttcgacagccagaccaacgtgtcccagagcaaggactccgacgtgtacatcaccgataagaccgtgctggacatgcggagcatggacttcaagagcaactccgccgtggcctggtccaacaagtccgatttcgcctgcgccaacgccttcaacaacagcattatccccgaggacacattcttcccaagccccgagagcagctgcggtacccaggctcagagcgattgcagctgtagcacagtgtctccaggcgtgctggccggaattgtgatgggcgatctggtgctgacagtgctgattgccctggccgtgtacttcctgggtagactggtgcctagaggaagaggcgctgccgaagccgccacaagaaagcagagaatcaccgagacagagagcccctaccaagagctgcaaggccagagaagcgacgtgtacagcgacctgaatacccagagggaccaaagactgcctcctgacgctcacaaacctccaggcggaggcagcttcagaacccctatccaagaggaacaggctgacgcccacagcaccctggcaaaaattcggccttactacaaataa

SEQ ID NO: 9502 - DNA, 2475 bp, Artificial Sequence
  Synthetic Polynucleotide
atggccttaccagtgaccgccttgctcctgccgctggccttgctgctccacgccgccaggccggaattcctggtggacatgaaagtgacccagatgcctcgctacctgattaagcggatgggcgagaacgtgctgctggaatgcggccaggatatgagccacgagacaatgtactggtacagacaggaccctggcctgggcctccagctgatctacatctcctacgacgtggacagcaacagcgagggcgacatccctaagggctacagagtgtcccggaagaagagagagcacttcagcctgatcctggacagcgccaagaccaaccagaccagcgtgtacttctgtgccagcagcagcaccaacaccgaggtgttctttggcaagggcaccagactgaccgtgctcctcgaggacctgaagaacgtgttcccacctgaggtggccgtgttcgagcctagcgaggccgagatcagccacacccagaaagccaccctcgtgtgcctggctaccggcttctaccccgaccatgtggaactgtcttggtgggtcaacggcaaagaggtgcacagcggcgtgtctaccgacccccagccactgaaagaacagcccgccctgaacgacagccggtactgcctgagcagcagactgagagtgtccgccaccttctggcagaacccccggaaccacttcagatgccaggtgcagttctacggcctgagcgagaacgacgagtggacccaggacagagccaagcccgtgacccagatcgtgtctgccgaagcctggggcagagccgattgcggatcccaggctcagagcgattgcagctgtagcacagtgtctccaggcgtgctggccggaattgtgatgggcgatctggtgctgacagtgctgattgccctggccgtgtacttcctgggtagactggtgcctagaggaagaggcgctgccgaagccgccacaagaaagcagagaatcaccgagacagagagcccctaccaagagctgcaaggccagagaagcgacgtgtacagcgacctgaatacccagcggccttactacaaaagggccaagcgatctggatctggagcaacaaacttctcactactcaaacaagcaggtgacgtggaggagaatcccgggcctactagtatggactggatttggcgcatccttttccttgtcggcgctgctaccggcgcgcattccttcgaagacggcgatagcgtgacccagacagagggactcgtgacactgaccgaaggactgcccgtgatgctgaactgcacctaccagacaatctacagcaaccccttcctgttttggtacgtgcagcacctgaacgagagccccagactgctgctgaagtccttcaccgacaacaagcggacagagcaccagggctttcacgccacactgcacaagagcagctccagcttccatctgcaaaagtctagcgcccagctgagcgacagcgccctgtactactgtgccttcgacaccaacacctacaaagtgatcttcggcaagggcacccatctgcacgtgctgcctaatacgcgtatccagaaccctgatcctgccgtgtaccagctgcgggatagcaagagcagcgacaagagcgtgtgtctgttcaccgacttcgacagccagaccaacgtgtcccagagcaaggactccgacgtgtacatcaccgataagaccgtgctggacatgcggagcatggacttcaagagcaactccgccgtggcctggtccaacaagtccgatttcgcctgcgccaacgccttcaacaacagcattatccccgaggacacattcttcccaagccccgagagcagctgcggtacccaggctcagagcgattgcagctgtagcacagtgtctccaggcgtgctggccggaattgtgatgggcgatctggtgctgacagtgctgattgccctggccgtgtacttcctgggtagactggtgcctagaggaagaggcgctgccgaagccgccacaagaaagcagagaatcaccgagacagagagcccctaccaagagctgcaaggccagagaagcgacgtgtacagcgacctgaatacccagtggcggcggaagcggaaagagaagcagtctgagacaagccccaaagagttcctgaccatctacgaggacgtgaaggacctgaaaacccggcggaaccacgaacaagagcagacctttcctggcggaggcagcaccatctacagcatgatccagagccagagcagcgcccctacaagccaagagcctgcctacacactgtactccctgatccagcctagcagaaagagcggcagccggaagagaaatcacagccccagcttcaacagcacgatctacgaagtgatcggcaagagccagccaaaggctcagaaccctgccagactgagccggaaagagctggaaaacttcgacgtgtacagccggccttactacaaataa

SEQ ID NO: 9503 - DNA, 2751 bp, Artificial Sequence
  Synthetic Polynucleotide
atggccttaccagtgaccgccttgctcctgccgctggccttgctgctccacgccgccaggccggaattcctggtggacatgaaagtgacccagatgcctcgctacctgattaagcggatgggcgagaacgtgctgctggaatgcggccaggatatgagccacgagacaatgtactggtacagacaggaccctggcctgggcctccagctgatctacatctcctacgacgtggacagcaacagcgagggcgacatccctaagggctacagagtgtcccggaagaagagagagcacttcagcctgatcctggacagcgccaagaccaaccagaccagcgtgtacttctgtgccagcagcagcaccaacaccgaggtgttctttggcaagggcaccagactgaccgtgctcctcgaggacctgaagaacgtgttcccacctgaggtggccgtgttcgagcctagcgaggccgagatcagccacacccagaaagccaccctcgtgtgcctggctaccggcttctaccccgaccatgtggaactgtcttggtgggtcaacggcaaagaggtgcacagcggcgtgtctaccgacccccagccactgaaagaacagcccgccctgaacgacagccggtactgcctgagcagcagactgagagtgtccgccaccttctggcagaacccccggaaccacttcagatgccaggtgcagttctacggcctgagcgagaacgacgagtggacccaggacagagccaagcccgtgacccagatcgtgtctgccgaagcctggggcagagccgattgcggatcccaggctcagagcgattgcagctgtagcacagtgtctccaggcgtgctggccggaattgtgatgggcgatctggtgctgacagtgctgattgccctggccgtgtacttcctgggtagactggtgcctagaggaagaggcgctgccgaagccgccacaagaaagcagagaatcaccgagacagagagcccctaccaagagctgcaaggccagagaagcgacgtgtacagcgacctgaatacccagagagtgaagttcagcagaagcgccgacgcccctgcctaccagcagggacagaaccaactgtacaacgagctgaacctgggcagacgggaagagtacgacgtgctggacaagcggagaggcagggaccctgagatgggcggaaagccccagcggagaaagaacccccaggaaggactgtataacgaactccagaaagacaagatggccgaagcctacagcgagatcggcatgaagggcgagcggagaagaggcaagggccacgatggcctgtaccagggcctgagcaccgccaccaaggacacctatgacgccctgcacatgcaggccctgcctccaagaagggccaagcgatctggatctggagcaacaaacttctcactactcaaacaagcaggtgacgtggaggagaatcccgggcctactagtatggactggatttggcgcatccttttccttgtcggcgctgctaccggcgcgcattccttcgaagacggcgatagcgtgacccagacagagggactcgtgacactgaccgaaggactgcccgtgatgctgaactgcacctaccagacaatctacagcaaccccttcctgttttggtacgtgcagcacctgaacgagagccccagactgctgctgaagtccttcaccgacaacaagcggacagagcaccagggctttcacgccacactgcacaagagcagctccagcttccatctgcaaaagtctagcgcccagctgagcgacagcgccctgtactactgtgccttcgacaccaacacctacaaagtgatcttcggcaagggcacccatctgcacgtgctgcctaatacgcgtatccagaaccctgatcctgccgtgtaccagctgcgggatagcaagagcagcgacaagagcgtgtgtctgttcaccgacttcgacagccagaccaacgtgtcccagagcaaggactccgacgtgtacatcaccgataagaccgtgctggacatgcggagcatggacttcaagagcaactccgccgtggcctggtccaacaagtccgatttcgcctgcgccaacgccttcaacaacagcattatccccgaggacacattcttcccaagccccgagagcagctgcggtaccacaacgccgggcgaaaggagttccttgccggccttttaccccggcacaagcggaagctgtagtgggtgtggaagcctcagcctcccacttcttgcgggcctcgtcgcggcagatgcagtagcttcacttcttattgtaggcgcggtatttctctgtgctcgaccaaggaggtcacccgctcaggaggatggtaaggtgtatataaatatgccaggacgcggaagctctagacgggttaagttttccagatccgcagacgcacccgcttaccaacaagggcagaaccaactctacaatgaacttaatttggggcggagggaagagtacgacgttctggacaaaaggaggggacgagatcccgagatgggcggaaagcctcagcgaaggaagaatccgcaagaggggctttataacgaactccagaaagataaaatggcagaagcctatagtgagattgggatgaagggagaaaggaggaggggtaaaggtcacgatgggttgtaccaaggattgagcacagccactaaagatacctatgatgcgctccacatgcaggccctgccgccaagataa

SEQ ID NO: 9504 - DNA, 2529 bp, Artificial Sequence
  Synthetic Polynucleotide
atggccttaccagtgaccgccttgctcctgccgctggccttgctgctccacgccgccaggccggaattcctggtggacatgaaagtgacccagatgcctcgctacctgattaagcggatgggcgagaacgtgctgctggaatgcggccaggatatgagccacgagacaatgtactggtacagacaggaccctggcctgggcctccagctgatctacatctcctacgacgtggacagcaacagcgagggcgacatccctaagggctacagagtgtcccggaagaagagagagcacttcagcctgatcctggacagcgccaagaccaaccagaccagcgtgtacttctgtgccagcagcagcaccaacaccgaggtgttctttggcaagggcaccagactgaccgtgctcctcgaggacctgaagaacgtgttcccacctgaggtggccgtgttcgagcctagcgaggccgagatcagccacacccagaaagccaccctcgtgtgcctggctaccggcttctaccccgaccatgtggaactgtcttggtgggtcaacggcaaagaggtgcacagcggcgtgtctaccgacccccagccactgaaagaacagcccgccctgaacgacagccggtactgcctgagcagcagactgagagtgtccgccaccttctggcagaacccccggaaccacttcagatgccaggtgcagttctacggcctgagcgagaacgacgagtggacccaggacagagccaagcccgtgacccagatcgtgtctgccgaagcctggggcagagccgattgcggatcccaggctcagagcgattgcagctgtagcacagtgtctccaggcgtgctggccggaattgtgatgggcgatctggtgctgacagtgctgattgccctggccgtgtacttcctgggtagactggtgcctagaggaagaggcgctgccgaagccgccacaagaaagcagagaatcaccgagacagagagcccctaccaagagctgcaaggccagagaagcgacgtgtacagcgacctgaatacccagagagtgaagttcagcagaagcgccgacgcccctgcctaccagcagggacagaaccaactgtacaacgagctgaacctgggcagacgggaagagtacgacgtgctggacaagcggagaggcagggaccctgagatgggcggaaagccccagcggagaaagaacccccaggaaggactgtataacgaactccagaaagacaagatggccgaagcctacagcgagatcggcatgaagggcgagcggagaagaggcaagggccacgatggcctgtaccagggcctgagcaccgccaccaaggacacctatgacgccctgcacatgcaggccctgcctccaagaagggccaagcgatctggatctggagcaacaaacttctcactactcaaacaagcaggtgacgtggaggagaatcccgggcctactagtatggactggatttggcgcatccttttccttgtcggcgctgctaccggcgcgcattccttcgaagacggcgatagcgtgacccagacagagggactcgtgacactgaccgaaggactgcccgtgatgctgaactgcacctaccagacaatctacagcaaccccttcctgttttggtacgtgcagcacctgaacgagagccccagactgctgctgaagtccttcaccgacaacaagcggacagagcaccagggctttcacgccacactgcacaagagcagctccagcttccatctgcaaaagtctagcgcccagctgagcgacagcgccctgtactactgtgccttcgacaccaacacctacaaagtgatcttcggcaagggcacccatctgcacgtgctgcctaatacgcgtatccagaaccctgatcctgccgtgtaccagctgcgggatagcaagagcagcgacaagagcgtgtgtctgttcaccgacttcgacagccagaccaacgtgtcccagagcaaggactccgacgtgtacatcaccgataagaccgtgctggacatgcggagcatggacttcaagagcaactccgccgtggcctggtccaacaagtccgatttcgcctgcgccaacgccttcaacaacagcattatccccgaggacacattcttcccaagccccgagagcagctgcggtaccacaacgccgggcgaaaggagttccttgccggccttttaccccggcacaagcggaagctgtagtgggtgtggaagcctcagcctcccacttcttgcgggcctcgtcgcggcagatgcagtagcttcacttcttattgtaggcgcggtatttaagagaggccggaagaagctgctgtacatcttcaagcagcctttcatgcggcccgtgcagaccacccaggaagaggacggctgctcctgccggttccccgaggaagaagaaggcggctgcgagctgctctgtgctcgaccaaggaggtcacccgctcaggaggatggtaaggtgtatataaatatgccaggacgcggataa

SEQ ID NO: 9505 - DNA, 2526 bp, Artificial Sequence
  Synthetic Polynucleotide
atggccttaccagtgaccgccttgctcctgccgctggccttgctgctccacgccgccaggccggaattcctggtggacatgaaagtgacccagatgcctcgctacctgattaagcggatgggcgagaacgtgctgctggaatgcggccaggatatgagccacgagacaatgtactggtacagacaggaccctggcctgggcctccagctgatctacatctcctacgacgtggacagcaacagcgagggcgacatccctaagggctacagagtgtcccggaagaagagagagcacttcagcctgatcctggacagcgccaagaccaaccagaccagcgtgtacttctgtgccagcagcagcaccaacaccgaggtgttctttggcaagggcaccagactgaccgtgctcctcgaggacctgaagaacgtgttcccacctgaggtggccgtgttcgagcctagcgaggccgagatcagccacacccagaaagccaccctcgtgtgcctggctaccggcttctaccccgaccatgtggaactgtcttggtgggtcaacggcaaagaggtgcacagcggcgtgtctaccgacccccagccactgaaagaacagcccgccctgaacgacagccggtactgcctgagcagcagactgagagtgtccgccaccttctggcagaacccccggaaccacttcagatgccaggtgcagttctacggcctgagcgagaacgacgagtggacccaggacagagccaagcccgtgacccagatcgtgtctgccgaagcctggggcagagccgattgcggatcccaggctcagagcgattgcagctgtagcacagtgtctccaggcgtgctggccggaattgtgatgggcgatctggtgctgacagtgctgattgccctggccgtgtacttcctgggtagactggtgcctagaggaagaggcgctgccgaagccgccacaagaaagcagagaatcaccgagacagagagcccctaccaagagctgcaaggccagagaagcgacgtgtacagcgacctgaatacccagagagtgaagttcagcagaagcgccgacgcccctgcctaccagcagggacagaaccaactgtacaacgagctgaacctgggcagacgggaagagtacgacgtgctggacaagcggagaggcagggaccctgagatgggcggaaagccccagcggagaaagaacccccaggaaggactgtataacgaactccagaaagacaagatggccgaagcctacagcgagatcggcatgaagggcgagcggagaagaggcaagggccacgatggcctgtaccagggcctgagcaccgccaccaaggacacctatgacgccctgcacatgcaggccctgcctccaagaagggccaagcgatctggatctggagcaacaaacttctcactactcaaacaagcaggtgacgtggaggagaatcccgggcctactagtatggactggatttggcgcatccttttccttgtcggcgctgctaccggcgcgcattccttcgaagacggcgatagcgtgacccagacagagggactcgtgacactgaccgaaggactgcccgtgatgctgaactgcacctaccagacaatctacagcaaccccttcctgttttggtacgtgcagcacctgaacgagagccccagactgctgctgaagtccttcaccgacaacaagcggacagagcaccagggctttcacgccacactgcacaagagcagctccagcttccatctgcaaaagtctagcgcccagctgagcgacagcgccctgtactactgtgccttcgacaccaacacctacaaagtgatcttcggcaagggcacccatctgcacgtgctgcctaatacgcgtatccagaaccctgatcctgccgtgtaccagctgcgggatagcaagagcagcgacaagagcgtgtgtctgttcaccgacttcgacagccagaccaacgtgtcccagagcaaggactccgacgtgtacatcaccgataagaccgtgctggacatgcggagcatggacttcaagagcaactccgccgtggcctggtccaacaagtccgatttcgcctgcgccaacgccttcaacaacagcattatccccgaggacacattcttcccaagccccgagagcagctgcggtaccacaacgccgggcgaaaggagttccttgccggccttttaccccggcacaagcggaagctgtagtgggtgtggaagcctcagcctcccacttcttgcgggcctcgtcgcggcagatgcagtagcttcacttcttattgtaggcgcggtatttaggagcaagcggtcacggctgctccacagcgattacatgaatatgacaccacgaagaccgggtcctactcgcaaacactaccaaccctacgcacctccccgcgactttgcagcgtaccgatctctctgtgctcgaccaaggaggtcacccgctcaggaggatggtaaggtgtatataaatatgccaggacgcggataa

SEQ ID NO: 9506 - DNA, 3156 bp, Artificial Sequence
  Synthetic Polynucleotide
atggccttaccagtgaccgccttgctcctgccgctggccttgctgctccacgccgccaggccggaattcctggtggacatgaaagtgacccagatgcctcgctacctgattaagcggatgggcgagaacgtgctgctggaatgcggccaggatatgagccacgagacaatgtactggtacagacaggaccctggcctgggcctccagctgatctacatctcctacgacgtggacagcaacagcgagggcgacatccctaagggctacagagtgtcccggaagaagagagagcacttcagcctgatcctggacagcgccaagaccaaccagaccagcgtgtacttctgtgccagcagcagcaccaacaccgaggtgttctttggcaagggcaccagactgaccgtgctcctcgaggacctgaagaacgtgttcccacctgaggtggccgtgttcgagcctagcgaggccgagatcagccacacccagaaagccaccctcgtgtgcctggctaccggcttctaccccgaccatgtggaactgtcttggtgggtcaacggcaaagaggtgcacagcggcgtgtctaccgacccccagccactgaaagaacagcccgccctgaacgacagccggtactgcctgagcagcagactgagagtgtccgccaccttctggcagaacccccggaaccacttcagatgccaggtgcagttctacggcctgagcgagaacgacgagtggacccaggacagagccaagcccgtgacccagatcgtgtctgccgaagcctggggcagagccgattgcggatcccagagcttcggcctgctggaccccaagctgtgctacctgctggatggcatcctgttcatctacggcgtgatcctgaccgccctgttcctgagagtgaagttcagcagaagcgccgacgcccctgcctaccagcagggacagaaccaactgtacaacgagctgaacctgggcagacgggaagagtacgacgtgctggacaagcggagaggcagggaccctgagatgggcggaaagccccagcggagaaagaacccccaggaaggactgtataacgaactccagaaagacaagatggccgaagcctacagcgagatcggcatgaagggcgagcggagaagaggcaagggccacgatggcctgtaccagggcctgagcaccgccaccaaggacacctatgacgccctgcacatgcaggccctgcctccaagaagggccaagcgatctggatctggagcaacaaacttctcactactcaaacaagcaggtgacgtggaggagaatcccgggcctactagtatggactggatttggcgcatccttttccttgtcggcgctgctaccggcgcgcattccttcgaagacggcgatagcgtgacccagacagagggactcgtgacactgaccgaaggactgcccgtgatgctgaactgcacctaccagacaatctacagcaaccccttcctgttttggtacgtgcagcacctgaacgagagccccagactgctgctgaagtccttcaccgacaacaagcggacagagcaccagggctttcacgccacactgcacaagagcagctccagcttccatctgcaaaagtctagcgcccagctgagcgacagcgccctgtactactgtgccttcgacaccaacacctacaaagtgatcttcggcaagggcacccatctgcacgtgctgcctaatacgcgtatccagaaccctgatcctgccgtgtaccagctgcgggatagcaagagcagcgacaagagcgtgtgtctgttcaccgacttcgacagccagaccaacgtgtcccagagcaaggactccgacgtgtacatcaccgataagaccgtgctggacatgcggagcatggacttcaagagcaactccgccgtggcctggtccaacaagtccgatttcgcctgcgccaacgccttcaacaacagcattatccccgaggacacattcttcccaagccccgagagcagctgcggtacccagagttttgggttgttggaccctaaattgtgctatctgttggacggaatcctgttcatttacggagtgatcctgaccgcattgttcctgcgggttaagttttccagatccgcagacgcacccgcttaccaacaagggcagaaccaactctacaatgaacttaatttggggcggagggaagagtacgacgttctggacaaaaggaggggacgagatcccgagatgggcggaaagcctcagcgaaggaagaatccgcaagaggggctttataacgaactccagaaagataaaatggcagaagcctatagtgagattgggatgaagggagaaaggaggaggggtaaaggtcacgatgggttgtaccaaggattgagcacagccactaaagatacctatgatgcgctccacatgcaggccctgccgccaagacgcgccaagagaagcggatctggcgtgaagcagaccctgaatttcgacctgctgaagctggctggcgacgtggaatccaacccaggcccttctagaggccatatgaccgagtacaagcccacggtgcgcctcgccacccgcgacgacgtccccagggccgtacgcaccctcgccgccgcgttcgccgactaccccgccacgcgccacaccgtcgatccggaccgccacatcgagcgggtcaccgagctgcaagaactcttcctcacgcgcgtcgggctcgacatcggcaaggtgtgggtcgcggacgacggcgccgcggtggcggtctggaccacgccggagagcgtcgaagcgggggcggtgttcgccgagatcggcccgcgcatggccgagttgagcggttcccggctggccgcgcagcaacagatggaaggcctcctggcgccgcaccggcccaaggagcccgcgtggttcctggccaccgtcggcgtctcgcccgaccaccagggcaagggtctgggcagcgccgtcgtgctccccggagtggaggcggccgagcgcgccggggtgcccgccttcctggagacctccgcgccccgcaacctccccttctacgagcggctcggcttcaccgtcaccgccgacgtcgaggtgcccgaaggaccgcgcacctggtgcatgacccgcaagcccggtgcctga

SEQ ID NO: 9507 - DNA, 2484 bp, Artificial Sequence
  Synthetic Polynucleotide
atggccttaccagtgaccgccttgctcctgccgctggccttgctgctccacgccgccaggccggaattcctggtggacatgaaagtgacccagatgcctcgctacctgattaagcggatgggcgagaacgtgctgctggaatgcggccaggatatgagccacgagacaatgtactggtacagacaggaccctggcctgggcctccagctgatctacatctcctacgacgtggacagcaacagcgagggcgacatccctaagggctacagagtgtcccggaagaagagagagcacttcagcctgatcctggacagcgccaagaccaaccagaccagcgtgtacttctgtgccagcagcagcaccaacaccgaggtgttctttggcaagggcaccagactgaccgtgctcctcgaggacctgaagaacgtgttcccacctgaggtggccgtgttcgagcctagcgaggccgagatcagccacacccagaaagccaccctcgtgtgcctggctaccggcttctaccccgaccatgtggaactgtcttggtgggtcaacggcaaagaggtgcacagcggcgtgtctaccgacccccagccactgaaagaacagcccgccctgaacgacagccggtactgcctgagcagcagactgagagtgtccgccaccttctggcagaacccccggaaccacttcagatgccaggtgcagttctacggcctgagcgagaacgacgagtggacccaggacagagccaagcccgtgacccagatcgtgtctgccgaagcctggggcagagccgattgcggatcccagagcttcggcctgctggaccccaagctgtgctacctgctggatggcatcctgttcatctacggcgtgatcctgaccgccctgttcctgagagtgaagttcagcagaagcgccgacgcccctgcctaccagcagggacagaaccaactgtacaacgagctgaacctgggcagacgggaagagtacgacgtgctggacaagcggagaggcagggaccctgagatgggcggaaagccccagcggagaaagaacccccaggaaggactgtataacgaactccagaaagacaagatggccgaagcctacagcgagatcggcatgaagggcgagcggagaagaggcaagggccacgatggcctgtaccagggcctgagcaccgccaccaaggacacctatgacgccctgcacatgcaggccctgcctccaagaagggccaagcgatctggatctggagcaacaaacttctcactactcaaacaagcaggtgacgtggaggagaatcccgggcctactagtatggactggatttggcgcatccttttccttgtcggcgctgctaccggcgcgcattccttcgaagacggcgatagcgtgacccagacagagggactcgtgacactgaccgaaggactgcccgtgatgctgaactgcacctaccagacaatctacagcaaccccttcctgttttggtacgtgcagcacctgaacgagagccccagactgctgctgaagtccttcaccgacaacaagcggacagagcaccagggctttcacgccacactgcacaagagcagctccagcttccatctgcaaaagtctagcgcccagctgagcgacagcgccctgtactactgtgccttcgacaccaacacctacaaagtgatcttcggcaagggcacccatctgcacgtgctgcctaatacgcgtgcctctacaaagggaccctccgtgtttcctctggctcccagcagcaagtctacaagcggaggaacagccgctctgggctgcctggtcaaggattactttcccgagcctgtgaccgtgtcctggaatagcggagcactgacaagcggcgtgcacacctttccagccgtgctgcaaagcagcggcctgtactctctgagcagcgtggtcacagtgcctagctctagcctgggcacccagacctacatctgcaatgtgaaccacaagcctagcaacaccaaggtggacaagagagtggaacccaagagctgtggtacccagagttttgggttgttggaccctaaattgagctatctgttggacggaatcctgttcatttacggagtgatcctgaccgcattgttcctgcgggttaagttttccagatccgcagacgcacccgcttaccaacaagggcagaaccaactctacaatgaacttaatttggggcggagggaagagtacgacgttctggacaaaaggaggggacgagatcccgagatgggcggaaagcctcagcgaaggaagaatccgcaagaggggctttataacgaactccagaaagataaaatggcagaagcctatagtgagattgggatgaagggagaaaggaggaggggtaaaggtcacgatgggttgtaccaaggattgagcacagccactaaagatacctatgatgcgctccacatgcaggccctgccgccaagataa

SEQ ID NO: 9508 - DNA, 2484 bp, Artificial Sequence; identical to SEQ ID NO: 9507
  Synthetic Polynucleotide

SEQ ID NO: 9509 - DNA, 2484 bp, Artificial Sequence; identical to SEQ ID NO: 9507
  Synthetic Polynucleotide

SEQ ID NO: 9510 - DNA, 2457 bp, Artificial Sequence
  Synthetic Polynucleotide
atggccttaccagtgaccgccttgctcctgccgctggccttgctgctccacgccgccaggccggaattcctggtggacatgaaagtgacccagatgcctcgctacctgattaagcggatgggcgagaacgtgctgctggaatgcggccaggatatgagccacgagacaatgtactggtacagacaggaccctggcctgggcctccagctgatctacatctcctacgacgtggacagcaacagcgagggcgacatccctaagggctacagagtgtcccggaagaagagagagcacttcagcctgatcctggacagcgccaagaccaaccagaccagcgtgtacttctgtgccagcagcagcaccaacaccgaggtgttctttggcaagggcaccagactgaccgtgctcctcgaggacctgaagaacgtgttcccacctgaggtggccgtgttcgagcctagcgaggccgagatcagccacacccagaaagccaccctcgtgtgcctggctaccggcttctaccccgaccatgtggaactgtcttggtgggtcaacggcaaagaggtgcacagcggcgtgtctaccgacccccagccactgaaagaacagcccgccctgaacgacagccggtactgcctgagcagcagactgagagtgtccgccaccttctggcagaacccccggaaccacttcagatgccaggtgcagttctacggcctgagcgagaacgacgagtggacccaggacagagccaagcccgtgacccagatcgtgtctgccgaagcctggggcagagccgattgcggatcccagagcttcggcctgctggaccccaagctgtgctacctgctggatggcatcctgttcatctacggcgtgatcctgaccgccctgttcctgagagtgaagttcagcagaagcgccgacgcccctgcctaccagcagggacagaaccaactgtacaacgagctgaacctgggcagacgggaagagtacgacgtgctggacaagcggagaggcagggaccctgagatgggcggaaagccccagcggagaaagaacccccaggaaggactgtataacgaactccagaaagacaagatggccgaagcctacagcgagatcggcatgaagggcgagcggagaagaggcaagggccacgatggcctgtaccagggcctgagcaccgccaccaaggacacctatgacgccctgcacatgcaggccctgcctccaagaagggccaagcgatctggatctggagcaacaaacttctcactactcaaacaagcaggtgacgtggaggagaatcccgggcctactagtatggactggatttggcgcatccttttccttgtcggcgctgctaccggcgcgcattccttcgaagacggcgatagcgtgacccagacagagggactcgtgacactgaccgaaggactgcccgtgatgctgaactgcacctaccagacaatctacagcaaccccttcctgttttggtacgtgcagcacctgaacgagagccccagactgctgctgaagtccttcaccgacaacaagcggacagagcaccagggctttcacgccacactgcacaagagcagctccagcttccatctgcaaaagtctagcgcccagctgagcgacagcgccctgtactactgtgccttcgacaccaacacctacaaagtgatcttcggcaagggcacccatctgcacgtgctgcctaatacgcgtatccagaaccctgatcctgccgtgtaccagctgcgggatagcaagagcagcgacaagagcgtgtgtctgttcaccgacttcgacagccagaccaacgtgtcccagagcaaggactccgacgtgtacatcaccgataagaccgtgctggacatgcggagcatggacttcaagagcaactccgccgtggcctggtccaacaagtccgatttcgcctgcgccaacgccttcaacaacagcattatccccgaggacacattcttcccaagccccgagagcagctgcggtacccagagttttgggttgttggaccctaaattgagctatctgttggacggaatcctgttcatttacggagtgatcctgaccgcattgttcctgcgggttaagttttccagatccgcagacgcacccgcttaccaacaagggcagaaccaactctacaatgaacttaatttggggcggagggaagagtacgacgttctggacaaaaggaggggacgagatcccgagatgggcggaaagcctcagcgaaggaagaatccgcaagaggggctttataacgaactccagaaagataaaatggcagaagcctatagtgagattgggatgaagggagaaaggaggaggggtaaaggtcacgatgggttgtaccaaggattgagcacagccactaaagatacctatgatgcgctccacatgcaggccctgccgccaagataa

SEQ ID NO: 9511 - DNA, 2859 bp, Artificial Sequence
  Synthetic Polynucleotide
atggccttaccagtgaccgccttgctcctgccgctggccttgctgctccacgccgccaggccggaattcctggtggacatgaaagtgacccagatgcctcgctacctgattaagcggatgggcgagaacgtgctgctggaatgcggccaggatatgagccacgagacaatgtactggtacagacaggaccctggcctgggcctccagctgatctacatctcctacgacgtggacagcaacagcgagggcgacatccctaagggctacagagtgtcccggaagaagagagagcacttcagcctgatcctggacagcgccaagaccaaccagaccagcgtgtacttctgtgccagcagcagcaccaacaccgaggtgttctttggcaagggcaccagactgaccgtgctcctcgagggacagcctaaggccaatcctaccgtgacactgttccctccaagcagcgaagaactccaggccaacaaggccacacttgtgtgcctgatctccgacttctaccctggggctgtgacagtggcttggaaggccgatggatctcctgtgaaagccggcgtggaaaccaccaagccatccaagcagagcaacaacaaatacgccgccagctcctacctgagcctgacacctgagcagtggaagtcccacagatcctacagctgccaagtgacccacgaaggcagcaccgtggaaaagacagtggcccctacagagtgcagcggatccctgggagagcctcagctgtgctatatcctggacgccatcctgtttctgtacggcatcgtgctgaccctgctgtactgccggctgaagatccaagtgcggaaggccgccatcaccagctacgagaaatccgacggcgtgtacaccggcctgagcaccagaaatcaagagacatacgagacactgaagcacgaaaagcctccacaaagggccaagcgatctggatctggagcaacaaacttctcactactcaaacaagcaggtgacgtggaggagaatcccgggcctactagtatggactggatttggcgcatccttttccttgtcggcgctgctaccggcgcgcattccttcgaagacggcgatagcgtgacccagacagagggactcgtgacactgaccgaaggactgcccgtgatgctgaactgcacctaccagacaatctacagcaaccccttcctgttttggtacgtgcagcacctgaacgagagccccagactgctgctgaagtccttcaccgacaacaagcggacagagcaccagggctttcacgccacactgcacaagagcagctccagcttccatctgcaaaagtctagcgcccagctgagcgacagcgccctgtactactgtgccttcgacaccaacacctacaaagtgatcttcggcaagggcacccatctgcacgtgctgcctaatacgcgtatccagaaccctgatcctgccgtgtaccagctgcgggatagcaagagcagcgacaagagcgtgtgtctgttcaccgacttcgacagccagaccaacgtgtcccagagcaaggactccgacgtgtacatcaccgataagaccgtgctggacatgcggagcatggacttcaagagcaactccgccgtggcctggtccaacaagtccgatttcgcctgcgccaacgccttcaacaacagcattatccccgaggacacattcttcccaagccccgagagcagctgcggtacccagagttttgggttgttggaccctaaattgtgctatctgttggacggaatcctgttcatttacggagtgatcctgaccgcattgttcctgcgggttaagttttccagatccgcagacgcacccgcttaccaacaagggcagaaccaactctacaatgaacttaatttggggcggagggaagagtacgacgttctggacaaaaggaggggacgagatcccgagatgggcggaaagcctcagcgaaggaagaatccgcaagaggggctttataacgaactccagaaagataaaatggcagaagcctatagtgagattgggatgaagggagaaaggaggaggggtaaaggtcacgatgggttgtaccaaggattgagcacagccactaaagatacctatgatgcgctccacatgcaggccctgccgccaagacgcgccaagagaagcggatctggcgtgaagcagaccctgaatttcgacctgctgaagctggctggcgacgtggaatccaacccaggcccttctagaggccatatgaccgagtacaagcccacggtgcgcctcgccacccgcgacgacgtccccagggccgtacgcaccctcgccgccgcgttcgccgactaccccgccacgcgccacaccgtcgatccggaccgccacatcgagcgggtcaccgagctgcaagaactcttcctcacgcgcgtcgggctcgacatcggcaaggtgtgggtcgcggacgacggcgccgcggtggcggtctggaccacgccggagagcgtcgaagcgggggcggtgttcgccgagatcggcccgcgcatggccgagttgagcggttcccggctggccgcgcagcaacagatggaaggcctcctggcgccgcaccggcccaaggagcccgcgtggttcctggccaccgtcggcgtctcgcccgaccaccagggcaagggtctgggcagcgccgtcgtgctccccggagtggaggcggccgagcgcgccggggtgcccgccttcctggagacctccgcgccccgcaacctccccttctacgagcggctcggcttcaccgtcaccgccgacgtcgaggtgcccgaaggaccgcgcacctggtgcatgacccgcaagcccggtgcctga

SEQ ID NO: 9512 - DNA, 2259 bp, Artificial Sequence
  Synthetic Polynucleotide
atggccttaccagtgaccgccttgctcctgccgctggccttgctgctccacgccgccaggccggaattcctggtggacatgaaagtgacccagatgcctcgctacctgattaagcggatgggcgagaacgtgctgctggaatgcggccaggatatgagccacgagacaatgtactggtacagacaggaccctggcctgggcctccagctgatctacatctcctacgacgtggacagcaacagcgagggcgacatccctaagggctacagagtgtcccggaagaagagagagcacttcagcctgatcctggacagcgccaagaccaaccagaccagcgtgtacttctgtgccagcagcagcaccaacaccgaggtgttctttggcaagggcaccagactgaccgtgctcctcgaggacctgaagaacgtgttcccacctgaggtggccgtgttcgagcctagcgaggccgagatcagccacacccagaaagccaccctcgtgtgcctggctaccggcttctaccccgaccatgtggaactgtcttggtgggtcaacggcaaagaggtgcacagcggcgtgtctaccgacccccagccactgaaagaacagcccgccctgaacgacagccggtactgcctgagcagcagactgagagtgtccgccaccttctggcagaacccccggaaccacttcagatgccaggtgcagttctacggcctgagcgagaacgacgagtggacccaggacagagccaagcccgtgacccagatcgtgtctgccgaagcctggggcagagccgattgcggatcccagagcttcggcctgctggaccccaagctgtgctacctgctggatggcatcctgttcatctacggcgtgatcctgaccgccctgttcctgagagtgaagttcagcagaagcgccgacgcccctgcctaccagcagggacagaaccaactgtacaacgagctgaacctgggcagacgggaagagtacgacgtgctggacaagcggagaggcagggaccctgagatgggcggaaagccccagcggagaaagaacccccaggaaggactgtataacgaactccagaaagacaagatggccgaagcctacagcgagatcggcatgaagggcgagcggagaagaggcaagggccacgatggcctgtaccagggcctgagcaccgccaccaaggacacctatgacgccctgcacatgcaggccctgcctccaagaagggccaagcgatctggatctggagcaacaaacttctcactactcaaacaagcaggtgacgtggaggagaatcccgggcctactagtatggactggatttggcgcatccttttccttgtcggcgctgctaccggcgcgcattccttcgaagacggcgatagcgtgacccagacagagggactcgtgacactgaccgaaggactgcccgtgatgctgaactgcacctaccagacaatctacagcaaccccttcctgttttggtacgtgcagcacctgaacgagagccccagactgctgctgaagtccttcaccgacaacaagcggacagagcaccagggctttcacgccacactgcacaagagcagctccagcttccatctgcaaaagtctagcgcccagctgagcgacagcgccctgtactactgtgccttcgacaccaacacctacaaagtgatcttcggcaagggcacccatctgcacgtgctgcctaatacgcgtgcctctacaaagggaccctccgtgtttcctctggctcccagcagcaagtctacaagcggaggaacagccgctctgggctgcctggtcaaggattactttcccgagcctgtgaccgtgtcctggaatagcggagcactgacaagcggcgtgcacacctttccagccgtgctgcaaagcagcggcctgtactctctgagcagcgtggtcacagtgcctagctctagcctgggcacccagacctacatctgcaatgtgaaccacaagcctagcaacaccaaggtggacaagagagtggaacccaagagctgtggtaccctcggagaaccacagctctgttacattctggatgctatcctgttcctctatgggatcgtcctgacactcctgtattgcagactcaaaattcaagttcgcaaagccgccattacctcttacgagaagagtgatggggtgtacacaggactgtctacccggaatcaagaaacctacgaaaccctcaaacatgagaagccacctcagtaa

SEQ ID NO: 9513 - DNA, 2259 bp, Artificial Sequence; identical to SEQ ID NO: 9512
  Synthetic Polynucleotide

SEQ ID NO: 9514 - DNA, 2232 bp, Artificial Sequence
  Synthetic Polynucleotide
atggccttaccagtgaccgccttgctcctgccgctggccttgctgctccacgccgccaggccggaattcctggtggacatgaaagtgacccagatgcctcgctacctgattaagcggatgggcgagaacgtgctgctggaatgcggccaggatatgagccacgagacaatgtactggtacagacaggaccctggcctgggcctccagctgatctacatctcctacgacgtggacagcaacagcgagggcgacatccctaagggctacagagtgtcccggaagaagagagagcacttcagcctgatcctggacagcgccaagaccaaccagaccagcgtgtacttctgtgccagcagcagcaccaacaccgaggtgttctttggcaagggcaccagactgaccgtgctcctcgaggacctgaagaacgtgttcccacctgaggtggccgtgttcgagcctagcgaggccgagatcagccacacccagaaagccaccctcgtgtgcctggctaccggcttctaccccgaccatgtggaactgtcttggtgggtcaacggcaaagaggtgcacagcggcgtgtctaccgacccccagccactgaaagaacagcccgccctgaacgacagccggtactgcctgagcagcagactgagagtgtccgccaccttctggcagaacccccggaaccacttcagatgccaggtgcagttctacggcctgagcgagaacgacgagtggacccaggacagagccaagcccgtgacccagatcgtgtctgccgaagcctggggcagagccgattgcggatcccagagcttcggcctgctggaccccaagctgtgctacctgctggatggcatcctgttcatctacggcgtgatcctgaccgccctgttcctgagagtgaagttcagcagaagcgccgacgcccctgcctaccagcagggacagaaccaactgtacaacgagctgaacctgggcagacgggaagagtacgacgtgctggacaagcggagaggcagggaccctgagatgggcggaaagccccagcggagaaagaacccccaggaaggactgtataacgaactccagaaagacaagatggccgaagcctacagcgagatcggcatgaagggcgagcggagaagaggcaagggccacgatggcctgtaccagggcctgagcaccgccaccaaggacacctatgacgccctgcacatgcaggccctgcctccaagaagggccaagcgatctggatctggagcaacaaacttctcactactcaaacaagcaggtgacgtggaggagaatcccgggcctactagtatggactggatttggcgcatccttttccttgtcggcgctgctaccggcgcgcattccttcgaagacggcgatagcgtgacccagacagagggactcgtgacactgaccgaaggactgcccgtgatgctgaactgcacctaccagacaatctacagcaaccccttcctgttttggtacgtgcagcacctgaacgagagccccagactgctgctgaagtccttcaccgacaacaagcggacagagcaccagggctttcacgccacactgcacaagagcagctccagcttccatctgcaaaagtctagcgcccagctgagcgacagcgccctgtactactgtgccttcgacaccaacacctacaaagtgatcttcggcaagggcacccatctgcacgtgctgcctaatacgcgtatccagaaccctgatcctgccgtgtaccagctgcgggatagcaagagcagcgacaagagcgtgtgtctgttcaccgacttcgacagccagaccaacgtgtcccagagcaaggactccgacgtgtacatcaccgataagaccgtgctggacatgcggagcatggacttcaagagcaactccgccgtggcctggtccaacaagtccgatttcgcctgcgccaacgccttcaacaacagcattatccccgaggacacattcttcccaagccccgagagcagctgcggtaccctcggagaaccacagctctgttacattctggatgctatcctgttcctctatgggatcgtcctgacactcctgtattgcagactcaaaattcaagttcgcaaagccgccattacctcttacgagaagagtgatggggtgtacacaggactgtctacccggaatcaagaaacctacgaaaccctcaaacatgagaagccacctcagtaa

SEQ ID NO: 9515 - DNA, 2871 bp, Artificial Sequence
  Synthetic Polynucleotide
atggccttaccagtgaccgccttgctcctgccgctggccttgctgctccacgccgccaggccggaattcctggtggacatgaaagtgacccagatgcctcgctacctgattaagcggatgggcgagaacgtgctgctggaatgcggccaggatatgagccacgagacaatgtactggtacagacaggaccctggcctgggcctccagctgatctacatctcctacgacgtggacagcaacagcgagggcgacatccctaagggctacagagtgtcccggaagaagagagagcacttcagcctgatcctggacagcgccaagaccaaccagaccagcgtgtacttctgtgccagcagcagcaccaacaccgaggtgttctttggcaagggcaccagactgaccgtgctcctcgagggacagcctaaggccaatcctaccgtgacactgttccctccaagcagcgaagaactccaggccaacaaggccacacttgtgtgcctgatctccgacttctaccctggggctgtgacagtggcttggaaggccgatggatctcctgtgaaagccggcgtggaaaccaccaagccatccaagcagagcaacaacaaatacgccgccagctcctacctgagcctgacacctgagcagtggaagtcccacagatcctacagctgccaagtgacccacgaaggcagcaccgtggaaaagacagtggcccctacagagtgcagcacaacacctggcgagagaagtagcctgcctgccttctatcctggcaccagcggctcttgttctggctgtggatctctgagcctgcctctgctggctggactggttgctgctgatgctgtggcctctctgctgattgtgggagccgtgttcctgtgcgccagacctagaagaagccccgctcaagaggacggcaaggtgtacatcaacatgcccggcagaggaagggccaagcgatctggatctggagcaacaaacttctcactactcaaacaagcaggtgacgtggaggagaatcccgggcctactagtatggactggatttggcgcatccttttccttgtcggcgctgctaccggcgcgcattccttcgaagacggcgatagcgtgacccagacagagggactcgtgacactgaccgaaggactgcccgtgatgctgaactgcacctaccagacaatctacagcaaccccttcctgttttggtacgtgcagcacctgaacgagagccccagactgctgctgaagtccttcaccgacaacaagcggacagagcaccagggctttcacgccacactgcacaagagcagctccagcttccatctgcaaaagtctagcgcccagctgagcgacagcgccctgtactactgtgccttcgacaccaacacctacaaagtgatcttcggcaagggcacccatctgcacgtgctgcctaatacgcgtatccagaaccctgatcctgccgtgtaccagctgcgggatagcaagagcagcgacaagagcgtgtgtctgttcaccgacttcgacagccagaccaacgtgtcccagagcaaggactccgacgtgtacatcaccgataagaccgtgctggacatgcggagcatggacttcaagagcaactccgccgtggcctggtccaacaagtccgatttcgcctgcgccaacgccttcaacaacagcattatccccgaggacacattcttcccaagccccgagagcagctgcggtacccagagttttgggttgttggaccctaaattgtgctatctgttggacggaatcctgttcatttacggagtgatcctgaccgcattgttcctgcgggttaagttttccagatccgcagacgcacccgcttaccaacaagggcagaaccaactctacaatgaacttaatttggggcggagggaagagtacgacgttctggacaaaaggaggggacgagatcccgagatgggcggaaagcctcagcgaaggaagaatccgcaagaggggctttataacgaactccagaaagataaaatggcagaagcctatagtgagattgggatgaagggagaaaggaggaggggtaaaggtcacgatgggttgtaccaaggattgagcacagccactaaagatacctatgatgcgctccacatgcaggccctgccgccaagacgcgccaagagaagcggatctggcgtgaagcagaccctgaatttcgacctgctgaagctggctggcgacgtggaatccaacccaggcccttctagaggccatatgaccgagtacaagcccacggtgcgcctcgccacccgcgacgacgtccccagggccgtacgcaccctcgccgccgcgttcgccgactaccccgccacgcgccacaccgtcgatccggaccgccacatcgagcgggtcaccgagctgcaagaactcttcctcacgcgcgtcgggctcgacatcggcaaggtgtgggtcgcggacgacggcgccgcggtggcggtctggaccacgccggagagcgtcgaagcgggggcggtgttcgccgagatcggcccgcgcatggccgagttgagcggttcccggctggccgcgcagcaacagatggaaggcctcctggcgccgcaccggcccaaggagcccgcgtggttcctggccaccgtcggcgtctcgcccgaccaccagggcaagggtctgggcagcgccgtcgtgctccccggagtggaggcggccgagcgcgccggggtgcccgccttcctggagacctccgcgccccgcaacctccccttctacgagcggctcggcttcaccgtcaccgccgacgtcgaggtgcccgaaggaccgcgcacctggtgcatgacccgcaagcccggtgcctga

SEQ ID NO: 9516 - DNA, 2970 bp, Artificial Sequence
  Synthetic Polynucleotide
atggccttaccagtgaccgccttgctcctgccgctggccttgctgctccacgccgccaggccggaattcctggtggacatgaaagtgacccagatgcctcgctacctgattaagcggatgggcgagaacgtgctgctggaatgcggccaggatatgagccacgagacaatgtactggtacagacaggaccctggcctgggcctccagctgatctacatctcctacgacgtggacagcaacagcgagggcgacatccctaagggctacagagtgtcccggaagaagagagagcacttcagcctgatcctggacagcgccaagaccaaccagaccagcgtgtacttctgtgccagcagcagcaccaacaccgaggtgttctttggcaagggcaccagactgaccgtgctcctcgaggacctgaagaacgtgttcccacctgaggtggccgtgttcgagcctagcgaggccgagatcagccacacccagaaagccaccctcgtgtgcctggctaccggcttctaccccgaccatgtggaactgtcttggtgggtcaacggcaaagaggtgcacagcggcgtgtctaccgacccccagccactgaaagaacagcccgccctgaacgacagccggtactgcctgagcagcagactgagagtgtccgccaccttctggcagaacccccggaaccacttcagatgccaggtgcagttctacggcctgagcgagaacgacgagtggacccaggacagagccaagcccgtgacccagatcgtgtctgccgaagcctggggcagagccgattgcggatcccagagcttcggcctgctggaccccaagctgtgctacctgctggatggcatcctgttcatctacggcgtgatcctgaccgccctgttcctgagagtgaagttcagcagaagcgccgacgcccctgcctaccagcagggacagaaccaactgtacaacgagctgaacctgggcagacgggaagagtacgacgtgctggacaagcggagaggcagggaccctgagatgggcggaaagccccagcggagaaagaacccccaggaaggactgtataacgaactccagaaagacaagatggccgaagcctacagcgagatcggcatgaagggcgagcggagaagaggcaagggccacgatggcctgtaccagggcctgagcaccgccaccaaggacacctatgacgccctgcacatgcaggccctgcctccaagaagggccaagcgatctggatctggagcaacaaacttctcactactcaaacaagcaggtgacgtggaggagaatcccgggcctactagtatggactggatttggcgcatccttttccttgtcggcgctgctaccggcgcgcattccttcgaagacggcgatagcgtgacccagacagagggactcgtgacactgaccgaaggactgcccgtgatgctgaactgcacctaccagacaatctacagcaaccccttcctgttttggtacgtgcagcacctgaacgagagccccagactgctgctgaagtccttcaccgacaacaagcggacagagcaccagggctttcacgccacactgcacaagagcagctccagcttccatctgcaaaagtctagcgcccagctgagcgacagcgccctgtactactgtgccttcgacaccaacacctacaaagtgatcttcggcaagggcacccatctgcacgtgctgcctaatacgcgtgcctctacaaagggaccctccgtgtttcctctggctcccagcagcaagtctacaagcggaggaacagccgctctgggctgcctggtcaaggattactttcccgagcctgtgaccgtgtcctggaatagcggagcactgacaagcggcgtgcacacctttccagccgtgctgcaaagcagcggcctgtactctctgagcagcgtggtcacagtgcctagctctagcctgggcacccagacctacatctgcaatgtgaaccacaagcctagcaacaccaaggtggacaagagagtggaacccaagagctgtacaacgccgggcgaaaggagttccttgccggccttttaccccggcacaagcggaagctgtagtgggtgtggaagcctcagcctcccacttcttgcgggcctcgtcgcggcagatgcagtagcttcacttcttattgtaggcgcggtatttctctgtgctcgaccaaggaggtcacccgctcaggaggatggtaaggtgtatataaatatgccaggacgcggacgcgccaagagaagcggatctggcgtgaagcagaccctgaatttcgacctgctgaagctggctggcgacgtggaatccaacccaggcccttctagaggccatatgaccgagtacaagcccacggtgcgcctcgccacccgcgacgacgtccccagggccgtacgcaccctcgccgccgcgttcgccgactaccccgccacgcgccacaccgtcgatccggaccgccacatcgagcgggtcaccgagctgcaagaactcttcctcacgcgcgtcgggctcgacatcggcaaggtgtgggtcgcggacgacggcgccgcggtggcggtctggaccacgccggagagcgtcgaagcgggggcggtgttcgccgagatcggcccgcgcatggccgagttgagcggttcccggctggccgcgcagcaacagatggaaggcctcctggcgccgcaccggcccaaggagcccgcgtggttcctggccaccgtcggcgtctcgcccgaccaccagggcaagggtctgggcagcgccgtcgtgctccccggagtggaggcggccgagcgcgccggggtgcccgccttcctggagacctccgcgccccgcaacctccccttctacgagcggctcggcttcaccgtcaccgccgacgtcgaggtgcccgaaggaccgcgcacctggtgcatgacccgcaagcccggtgcctga

SEQ ID NO: 9517 - DNA, 2970 bp, Artificial Sequence; identical to SEQ ID NO: 9516
  Synthetic Polynucleotide

SEQ ID NO: 9518 - DNA, 3291 bp, Artificial Sequence
  Synthetic Polynucleotide
atggccttaccagtgaccgccttgctcctgccgctggccttgctgctccacgccgccaggccggaattcctggtggacatgaaagtgacccagatgcctcgctacctgattaagcggatgggcgagaacgtgctgctggaatgcggccaggatatgagccacgagacaatgtactggtacagacaggaccctggcctgggcctccagctgatctacatctcctacgacgtggacagcaacagcgagggcgacatccctaagggctacagagtgtcccggaagaagagagagcacttcagcctgatcctggacagcgccaagaccaaccagaccagcgtgtacttctgtgccagcagcagcaccaacaccgaggtgttctttggcaagggcaccagactgaccgtgctcctcgaggacctgaagaacgtgttcccacctgaggtggccgtgttcgagcctagcgaggccgagatcagccacacccagaaagccaccctcgtgtgcctggctaccggcttctaccccgaccatgtggaactgtcttggtgggtcaacggcaaagaggtgcacagcggcgtgtctaccgacccccagccactgaaagaacagcccgccctgaacgacagccggtactgcctgagcagcagactgagagtgtccgccaccttctggcagaacccccggaaccacttcagatgccaggtgcagttctacggcctgagcgagaacgacgagtggacccaggacagagccaagcccgtgacccagatcgtgtctgccgaagcctggggcagagccgattgcggatccacaacacctggcgagagaagtagcctgcctgccttctatcctggcaccagcggctcttgttctggctgtggatctctgagcctgcctctgctggctggactggttgctgctgatgctgtggcctctctgctgattgtgggagccgtgttcctgtgcgccagacctagaagaagccccgctcaagaggacggcaaggtgtacatcaacatgcccggcagaggaagcactagtagagtgaagttcagcagaagcgccgacgcccctgcctaccagcagggacagaaccaactgtacaacgagctgaacctgggcagacgggaagagtacgacgtgctggacaagcggagaggcagggaccctgagatgggcggaaagccccagcggagaaagaacccccaggaaggactgtataacgaactccagaaagacaagatggccgaagcctacagcgagatcggcatgaagggcgagcggagaagaggcaagggccacgatggcctgtaccagggcctgagcaccgccaccaaggacacctatgacgccctgcacatgcaggccctgcctccaagaagggccaagcgatctggatctggagcaacaaacttctcactactcaaacaagcaggtgacgtggaggagaatcccgggcctatggactggatttggcgcatccttttccttgtcggcgctgctaccggcgcgcattccttcgaagacggcgatagcgtgacccagacagagggactcgtgacactgaccgaaggactgcccgtgatgctgaactgcacctaccagacaatctacagcaaccccttcctgttttggtacgtgcagcacctgaacgagagccccagactgctgctgaagtccttcaccgacaacaagcggacagagcaccagggctttcacgccacactgcacaagagcagctccagcttccatctgcaaaagtctagcgcccagctgagcgacagcgccctgtactactgtgccttcgacaccaacacctacaaagtgatcttcggcaagggcacccatctgcacgtgctgcctaatacgcgtatccagaaccctgatcctgccgtgtaccagctgcgggatagcaagagcagcgacaagagcgtgtgtctgttcaccgacttcgacagccagaccaacgtgtcccagagcaaggactccgacgtgtacatcaccgataagaccgtgctggacatgcggagcatggacttcaagagcaactccgccgtggcctggtccaacaagtccgatttcgcctgcgccaacgccttcaacaacagcattatccccgaggacacattcttcccaagccccgagagcagctgcggtacccagagttttgggttgttggaccctaaattgtgctatctgttggacggaatcctgttcatttacggagtgatcctgaccgcattgttcctgcgggttaagttttccagatccgcagacgcacccgcttaccaacaagggcagaaccaactctacaatgaacttaatttggggcggagggaagagtacgacgttctggacaaaaggaggggacgagatcccgagatgggcggaaagcctcagcgaaggaagaatccgcaagaggggctttataacgaactccagaaagataaaatggcagaagcctatagtgagattgggatgaagggagaaaggaggaggggtaaaggtcacgatgggttgtaccaaggattgagcacagccactaaagatacctatgatgcgctccacatgcaggccctgccgccaagacgcgccaagagaagcggatctggcgtgaagcagaccctgaatttcgacctgctgaagctggctggcgacgtggaatccaacccaggcccttctagaggccatatgaccgagtacaagcccacggtgcgcctcgccacccgcgacgacgtccccagggccgtacgcaccctcgccgccgcgttcgccgactaccccgccacgcgccacaccgtcgatccggaccgccacatcgagcgggtcaccgagctgcaagaactcttcctcacgcgcgtcgggctcgacatcggcaaggtgtgggtcgcggacgacggcgccgcggtggcggtctggaccacgccggagagcgtcgaagcgggggcggtgttcgccgagatcggcccgcgcatggccgagttgagcggttcccggctggccgcgcagcaacagatggaaggcctcctggcgccgcaccggcccaaggagcccgcgtggttcctggccaccgtcggcgtctcgcccgaccaccagggcaagggtctgggcagcgccgtcgtgctccccggagtggaggcggccgagcgcgccggggtgcccgccttcctggagacctccgcgccccgcaacctccccttctacgagcggctcggcttcaccgtcaccgccgacgtcgaggtgcccgaaggaccgcgcacctggtgcatgacccgcaagcccggtgcctga

SEQ ID NO: 9519 - DNA, 2970 bp, Artificial Sequence
  Synthetic Polynucleotide
atggccttaccagtgaccgccttgctcctgccgctggccttgctgctccacgccgccaggccggctatccagaccaccgaccagggcgaagtgcccaatggctacaacgtgtccagaagcaccatcgaggacttcccaccactgacactggaaagcgccagacctagccacaccagccagtacctgtgtgcctcttctgaggccagaggactggccgagttcaccgacacacagtatttcggccctggcaccagactgaccgttctcgagggacagcctaaggccaatcctaccgtgacactgttccctccaagcagcgaagaactccaggccaacaaggccacacttgtgtgcctgatctccgacttctaccctggggctgtgacagtggcttggaaggccgatggatctcctgtgaaagccggcgtggaaaccaccaagccatccaagcagagcaacaacaaatacgccgccagctcctacctgagcctgacacctgagcagtggaagtcccacagatcctacagctgccaagtgacccacgaaggcagcaccgtggaaaagacagtggcccctacagagtgcagcggatcccagagcttcggcctgctggaccccaagctgtgctacctgctggatggcatcctgttcatctacggcgtgatcctgaccgccctgttcctgagagtgaagttcagcagaagcgccgacgcccctgcctaccagcagggacagaaccaactgtacaacgagctgaacctgggcagacgggaagagtacgacgtgctggacaagcggagaggcagggaccctgagatgggcggaaagccccagcggagaaagaacccccaggaaggactgtataacgaactccagaaagacaagatggccgaagcctacagcgagatcggcatgaagggcgagcggagaagaggcaagggccacgatggcctgtaccagggcctgagcaccgccaccaaggacacctatgacgccctgcacatgcaggccctgcctccaagaagggccaagcgatctggatctggagcaacaaacttctcactactcaaacaagcaggtgacgtggaggagaatcccgggcctactagtatggactggatttggcgcatccttttccttgtcggcgctgctaccggcgcgcattccttcgaagcccagaccgtgacacagagccagcctgagatgtctgtgcaagaggccgagacagtgaccctgagctgcacctacgataccagcgagagcgactactacctgttctggtacaagcagcctcctagccggcagatgatcctggtcatccggcaagaagcctataagcagcagaacgccaccgagaacagattcagcgtgaacttccagaaggccgccaagagcttcagcctgaagatcagcgatagccagctgggcgacgccgccatgtacttttgcgcttatagaagcgccgtgaacgcccggctgatgtttggagatggcacacagctggtggtcaagcccaacacgcgtgcctctacaaagggaccctccgtgtttcctctggctcccagcagcaagtctacaagcggaggaacagccgctctgggctgcctggtcaaggattactttcccgagcctgtgaccgtgtcctggaatagcggagcactgacaagcggcgtgcacacctttccagccgtgctgcaaagcagcggcctgtactctctgagcagcgtggtcacagtgcctagctctagcctgggcacccagacctacatctgcaatgtgaaccacaagcctagcaacaccaaggtggacaagagagtggaacccaagagctgtggtacccagagttttgggttgttggaccctaaattgtgctatctgttggacggaatcctgttcatttacggagtgatcctgaccgcattgttcctgcgggttaagttttccagatccgcagacgcacccgcttaccaacaagggcagaaccaactctacaatgaacttaatttggggcggagggaagagtacgacgttctggacaaaaggaggggacgagatcccgagatgggcggaaagcctcagcgaaggaagaatccgcaagaggggctttataacgaactccagaaagataaaatggcagaagcctatagtgagattgggatgaagggagaaaggaggaggggtaaaggtcacgatgggttgtaccaaggattgagcacagccactaaagatacctatgatgcgctccacatgcaggccctgccgccaagacgcgccaagagaagcggatctggcgtgaagcagaccctgaatttcgacctgctgaagctggctggcgacgtggaatccaacccaggcccttctagaggccatatgaccgagtacaagcccacggtgcgcctcgccacccgcgacgacgtccccagggccgtacgcaccctcgccgccgcgttcgccgactaccccgccacgcgccacaccgtcgatccggaccgccacatcgagcgggtcaccgagctgcaagaactcttcctcacgcgcgtcgggctcgacatcggcaaggtgtgggtcgcggacgacggcgccgcggtggcggtctggaccacgccggagagcgtcgaagcgggggcggtgttcgccgagatcggcccgcgcatggccgagttgagcggttcccggctggccgcgcagcaacagatggaaggcctcctggcgccgcaccggcccaaggagcccgcgtggttcctggccaccgtcggcgtctcgcccgaccaccagggcaagggtctgggcagcgccgtcgtgctccccggagtggaggcggccgagcgcgccggggtgcccgccttcctggagacctccgcgccccgcaacctccccttctacgagcggctcggcttcaccgtcaccgccgacgtcgaggtgcccgaaggaccgcgcacctggtgcatgacccgcaagcccggtgcctga

SEQ ID NO: 9520 - DNA, 3024 bp, Artificial Sequence
  Synthetic Polynucleotide
atggccttaccagtgaccgccttgctcctgccgctggccttgctgctccacgccgccaggccggctatccagaccaccgaccagggcgaagtgcccaatggctacaacgtgtccagaagcaccatcgaggacttcccaccactgacactggaaagcgccagacctagccacaccagccagtacctgtgtgcctcttctgaggccagaggactggccgagttcaccgacacacagtatttcggccctggcaccagactgaccgttctcgagggacagcctaaggccaatcctaccgtgacactgttccctccaagcagcgaagaactccaggccaacaaggccacacttgtgtgcctgatctccgacttctaccctggggctgtgacagtggcttggaaggccgatggatctcctgtgaaagccggcgtggaaaccaccaagccatccaagcagagcaacaacaaatacgccgccagctcctacctgagcctgacacctgagcagtggaagtcccacagatcctacagctgccaagtgacccacgaaggcagcaccgtggaaaagacagtggcccctacagagtgcagcggatcccagagcttcggcctgctggaccccaagctgtgctacctgctggatggcatcctgttcatctacggcgtgatcctgaccgccctgttcctgagagtgaagttcagcagaagcgccgacgcccctgcctaccagcagggacagaaccaactgtacaacgagctgaacctgggcagacgggaagagtacgacgtgctggacaagcggagaggcagggaccctgagatgggcggaaagccccagcggagaaagaacccccaggaaggactgtataacgaactccagaaagacaagatggccgaagcctacagcgagatcggcatgaagggcgagcggagaagaggcaagggccacgatggcctgtaccagggcctgagcaccgccaccaaggacacctatgacgccctgcacatgcaggccctgcctccaagaagggccaagcgatctggatctggagcaacaaacttctcactactcaaacaagcaggtgacgtggaggagaatcccgggcctactagtatggactggatttggcgcatccttttccttgtcggcgctgctaccggcgcgcattccttcgaagcccagaccgtgacacagagccagcctgagatgtctgtgcaagaggccgagacagtgaccctgagctgcacctacgataccagcgagagcgactactacctgttctggtacaagcagcctcctagccggcagatgatcctggtcatccggcaagaagcctataagcagcagaacgccaccgagaacagattcagcgtgaacttccagaaggccgccaagagcttcagcctgaagatcagcgatagccagctgggcgacgccgccatgtacttttgcgcttatagaagcgccgtgaacgcccggctgatgtttggagatggcacacagctggtggtcaagcccaacacgcgtgcgtctcccacttctccgaaagttttccccctttccctctgtagcacacaacctgatggaaatgtggtcatcgcatgtctggtacaaggattctttccacaagagccattgagcgttacatggtcagagagcgggcagggagttaccgctaggaatttcccaccctcacaggatgcgagtggtgatctttataccacatcatcacaactcacgttgccagccactcagtgcctcgctggaaagtcagtaacatgccatgtcaaacattacactaatccctcacaagatgttaccgtgccttgcccagtaccttctacgccgcccaccccgtctccatctactccacccacgccatcacctagtggtacccagagttttgggttgttggaccctaaattgtgctatctgttggacggaatcctgttcatttacggagtgatcctgaccgcattgttcctgcgggttaagttttccagatccgcagacgcacccgcttaccaacaagggcagaaccaactctacaatgaacttaatttggggcggagggaagagtacgacgttctggacaaaaggaggggacgagatcccgagatgggcggaaagcctcagcgaaggaagaatccgcaagaggggctttataacgaactccagaaagataaaatggcagaagcctatagtgagattgggatgaagggagaaaggaggaggggtaaaggtcacgatgggttgtaccaaggattgagcacagccactaaagatacctatgatgcgctccacatgcaggccctgccgccaagacgcgccaagagaagcggatctggcgtgaagcagaccctgaatttcgacctgctgaagctggctggcgacgtggaatccaacccaggcccttctagaggccatatgaccgagtacaagcccacggtgcgcctcgccacccgcgacgacgtccccagggccgtacgcaccctcgccgccgcgttcgccgactaccccgccacgcgccacaccgtcgatccggaccgccacatcgagcgggtcaccgagctgcaagaactcttcctcacgcgcgtcgggctcgacatcggcaaggtgtgggtcgcggacgacggcgccgcggtggcggtctggaccacgccggagagcgtcgaagcgggggcggtgttcgccgagatcggcccgcgcatggccgagttgagcggttcccggctggccgcgcagcaacagatggaaggcctcctggcgccgcaccggcccaaggagcccgcgtggttcctggccaccgtcggcgtctcgcccgaccaccagggcaagggtctgggcagcgccgtcgtgctccccggagtggaggcggccgagcgcgccggggtgcccgccttcctggagacctccgcgccccgcaacctccccttctacgagcggctcggcttcaccgtcaccgccgacgtcgaggtgcccgaaggaccgcgcacctggtgcatgacccgcaagcccggtgcctga

SEQ ID NO: 9521 - DNA, 2982 bp, Artificial Sequence
  Synthetic Polynucleotide
gctagcaccatggccttaccagtgaccgccttgctcctgccgctggccttgctgctccacgccgccaggccggctatccagaccaccgaccagggcgaagtgcccaatggctacaacgtgtccagaagcaccatcgaggacttcccaccactgacactggaaagcgccagacctagccacaccagccagtacctgtgtgcctcttctgaggccagaggactggccgagttcaccgacacacagtatttcggccctggcaccagactgaccgttctcgagggacagcctaaggccaatcctaccgtgacactgttccctccaagcagcgaagaactccaggccaacaaggccacacttgtgtgcctgatctccgacttctaccctggggctgtgacagtggcttggaaggccgatggatctcctgtgaaagccggcgtggaaaccaccaagccatccaagcagagcaacaacaaatacgccgccagctcctacctgagcctgacacctgagcagtggaagtcccacagatcctacagctgccaagtgacccacgaaggcagcaccgtggaaaagacagtggcccctacagagtgcagcggatcccagagcttcggcctgctggaccccaagctgtgctacctgctggatggcatcctgttcatctacggcgtgatcctgaccgccctgttcctgagagtgaagttcagcagaagcgccgacgcccctgcctaccagcagggacagaaccaactgtacaacgagctgaacctgggcagacgggaagagtacgacgtgctggacaagcggagaggcagggaccctgagatgggcggaaagccccagcggagaaagaacccccaggaaggactgtataacgaactccagaaagacaagatggccgaagcctacagcgagatcggcatgaagggcgagcggagaagaggcaagggccacgatggcctgtaccagggcctgagcaccgccaccaaggacacctatgacgccctgcacatgcaggccctgcctccaagaagggccaagcgatctggatctggagcaacaaacttctcactactcaaacaagcaggtgacgtggaggagaatcccgggcctactagtatggactggatttggcgcatccttttccttgtcggcgctgctaccggcgcgcattccttcgaagcccagaccgtgacacagagccagcctgagatgtctgtgcaagaggccgagacagtgaccctgagctgcacctacgataccagcgagagcgactactacctgttctggtacaagcagcctcctagccggcagatgatcctggtcatccggcaagaagcctataagcagcagaacgccaccgagaacagattcagcgtgaacttccagaaggccgccaagagcttcagcctgaagatcagcgatagccagctgggcgacgccgccatgtacttttgcgcttatagaagcgccgtgaacgcccggctgatgtttggagatggcacacagctggtggtcaagcccaacacgcgtgcctccacgaagggaccatctgttttccctcttgccccctgctcacggtcaacgtctgaatccacggcagccctgggctgcctcgttaaggactactttccagagccggtaacagtctcctggaacagtggagcccttacatcaggtgttcacactttccctgccgtcttgcaaagtagcggactgtacagccttagttccgttgttacggttccttctagcaacttcggtacacagacatatacttgtaacgtagatcataagcctagcaacaccaaggtggacaaaaccgtagagagaaagtgtggtacccagagttttgggttgttggaccctaaattgtgctatctgttggacggaatcctgttcatttacggagtgatcctgaccgcattgttcctgcgggttaagttttccagatccgcagacgcacccgcttaccaacaagggcagaaccaactctacaatgaacttaatttggggcggagggaagagtacgacgttctggacaaaaggaggggacgagatcccgagatgggcggaaagcctcagcgaaggaagaatccgcaagaggggctttataacgaactccagaaagataaaatggcagaagcctatagtgagattgggatgaagggagaaaggaggaggggtaaaggtcacgatgggttgtaccaaggattgagcacagccactaaagatacctatgatgcgctccacatgcaggccctgccgccaagacgcgccaagagaagcggatctggcgtgaagcagaccctgaatttcgacctgctgaagctggctggcgacgtggaatccaacccaggcccttctagaggccatatgaccgagtacaagcccacggtgcgcctcgccacccgcgacgacgtccccagggccgtacgcaccctcgccgccgcgttcgccgactaccccgccacgcgccacaccgtcgatccggaccgccacatcgagcgggtcaccgagctgcaagaactcttcctcacgcgcgtcgggctcgacatcggcaaggtgtgggtcgcggacgacggcgccgcggtggcggtctggaccacgccggagagcgtcgaagcgggggcggtgttcgccgagatcggcccgcgcatggccgagttgagcggttcccggctggccgcgcagcaacagatggaaggcctcctggcgccgcaccggcccaaggagcccgcgtggttcctggccaccgtcggcgtctcgcccgaccaccagggcaagggtctgggcagcgccgtcgtgctccccggagtggaggcggccgagcgcgccggggtgcccgccttcctggagacctccgcgccccgcaacctccccttctacgagcggctcggcttcaccgtcaccgccgacgtcgaggtgcccgaaggaccgcgcacctggtgcatgacccgcaagcccggtgcctgagtcgac

SEQ ID NO: 9522 - DNA, 3285 bp, Artificial Sequence
  Synthetic Polynucleotide
atggccttaccagtgaccgccttgctcctgccgctggccttgctgctccacgccgccaggccggaagccgacatctaccagacacctagatacctggtcatcggcaccggcaagaaaatcaccctggaatgcagccagacaatgggccacgacaagatgtactggtatcagcaggaccccggcatggaactgcacctgatccactacagctacggcgtgaacagcaccgagaagggcgatctgtctagcgagagcaccgtgtccagaatcagaaccgagcacttcccactgacactggaaagcgccagacctagccacaccagccagtacctgtgtgcctcttctgaggccagaggactggccgagttcaccgacacacagtatttcggccctggcaccagactgaccgttctcgagggacagcctaaggccaatcctaccgtgacactgttccctccaagcagcgaagaactccaggccaacaaggccacacttgtgtgcctgatctccgacttctaccctggggctgtgacagtggcttggaaggccgatggatctcctgtgaaagccggcgtggaaaccaccaagccatccaagcagagcaacaacaaatacgccgccagctcctacctgagcctgacacctgagcagtggaagtcccacagatcctacagctgccaagtgacccacgaaggcagcaccgtggaaaagacagtggcccctacagagtgcagcggatcccagagcttcggcctgctggaccccaagctgtgctacctgctggatggcatcctgttcatctacggcgtgatcctgaccgccctgttcctgagagtgaagttcagcagaagcgccgacgcccctgcctaccagcagggacagaaccaactgtacaacgagctgaacctgggcagacgggaagagtacgacgtgctggacaagcggagaggcagggaccctgagatgggcggaaagccccagcggagaaagaacccccaggaaggactgtataacgaactccagaaagacaagatggccgaagcctacagcgagatcggcatgaagggcgagcggagaagaggcaagggccacgatggcctgtaccagggcctgagcaccgccaccaaggacacctatgacgccctgcacatgcaggccctgcctccaagaagggccaagcgatctggatctggagcaacaaacttctcactactcaaacaagcaggtgacgtggaggagaatcccgggcctactagtatggactggatttggcgcatccttttccttgtcggcgctgctaccggcgcgcattccttcgaagcccagaccgtgacacagagccagcctgagatgtctgtgcaagaggccgagacagtgaccctgagctgcacctacgataccagcgagagcgactactacctgttctggtacaagcagcctcctagccggcagatgatcctggtcatccggcaagaagcctataagcagcagaacgccaccgagaacagattcagcgtgaacttccagaaggccgccaagagcttcagcctgaagatcagcgatagccagctgggcgacgccgccatgtacttttgcgcttatagaagcgccgtgaacgcccggctgatgtttggagatggcacacagctggtggtcaagcccaacacgcgtgctccgacaaaggcgccagacgtttttcctattatttcaggatgtcggcatccgaaagataattccccagttgttctggcgtgtcttatcacgggctaccatcctacatctgttaccgttacgtggtatatgggtacgcaaagccaacctcagcggacttttccagagatccaacggcgagattcatattatatgacatccagtcagttgagtacaccgctgcaacagtggcggcaaggtgagtataagtgtgtggtccaacacacagccagtaaaagtaagaaagagatattccggtggcctgaaagcccgaaggcacaagcatcttctgttccgacggcgcaaccgcaagctgaaggaagtcttgcaaaagcaaccacagcacccgcgacaacacgaaacacaggacgcggaggcgaggaaaagaaaaaagaaaaggaaaaggaagagcaagaggagagggaaactaagacccccggtacccagagttttgggttgttggaccctaaattgtgctatctgttggacggaatcctgttcatttacggagtgatcctgaccgcattgttcctgcgggttaagttttccagatccgcagacgcacccgcttaccaacaagggcagaaccaactctacaatgaacttaatttggggcggagggaagagtacgacgttctggacaaaaggaggggacgagatcccgagatgggcggaaagcctcagcgaaggaagaatccgcaagaggggctttataacgaactccagaaagataaaatggcagaagcctatagtgagattgggatgaagggagaaaggaggaggggtaaaggtcacgatgggttgtaccaaggattgagcacagccactaaagatacctatgatgcgctccacatgcaggccctgccgccaagacgcgccaagagaagcggatctggcgtgaagcagaccctgaatttcgacctgctgaagctggctggcgacgtggaatccaacccaggcccttctagaggccatatgaccgagtacaagcccacggtgcgcctcgccacccgcgacgacgtccccagggccgtacgcaccctcgccgccgcgttcgccgactaccccgccacgcgccacaccgtcgatccggaccgccacatcgagcgggtcaccgagctgcaagaactcttcctcacgcgcgtcgggctcgacatcggcaaggtgtgggtcgcggacgacggcgccgcggtggcggtctggaccacgccggagagcgtcgaagcgggggcggtgttcgccgagatcggcccgcgcatggccgagttgagcggttcccggctggccgcgcagcaacagatggaaggcctcctggcgccgcaccggcccaaggagcccgcgtggttcctggccaccgtcggcgtctcgcccgaccaccagggcaagggtctgggcagcgccgtcgtgctccccggagtggaggcggccgagcgcgccggggtgcccgccttcctggagacctccgcgccccgcaacctccccttctacgagcggctcggcttcaccgtcaccgccgacgtcgaggtgcccgaaggaccgcgcacctggtgcatgacccgcaagcccggtgcctga

SEQ ID NO: 9523 - DNA, 3111 bp, Artificial Sequence
  Synthetic Polynucleotide
atggccttaccagtgaccgccttgctcctgccgctggccttgctgctccacgccgccaggccggaagccgacatctaccagacacctagatacctggtcatcggcaccggcaagaaaatcaccctggaatgcagccagacaatgggccacgacaagatgtactggtatcagcaggaccccggcatggaactgcacctgatccactacagctacggcgtgaacagcaccgagaagggcgatctgtctagcgagagcaccgtgtccagaatcagaaccgagcacttcccactgacactggaaagcgccagacctagccacaccagccagtacctgtgtgcctcttctgaggccagaggactggccgagttcaccgacacacagtatttcggccctggcaccagactgaccgttctcgagggacagcctaaggccaatcctaccgtgacactgttccctccaagcagcgaagaactccaggccaacaaggccacacttgtgtgcctgatctccgacttctaccctggggctgtgacagtggcttggaaggccgatggatctcctgtgaaagccggcgtggaaaccaccaagccatccaagcagagcaacaacaaatacgccgccagctcctacctgagcctgacacctgagcagtggaagtcccacagatcctacagctgccaagtgacccacgaaggcagcaccgtggaaaagacagtggcccctacagagtgcagcggatcccagagcttcggcctgctggaccccaagctgtgctacctgctggatggcatcctgttcatctacggcgtgatcctgaccgccctgttcctgagagtgaagttcagcagaagcgccgacgcccctgcctaccagcagggacagaaccaactgtacaacgagctgaacctgggcagacgggaagagtacgacgtgctggacaagcggagaggcagggaccctgagatgggcggaaagccccagcggagaaagaacccccaggaaggactgtataacgaactccagaaagacaagatggccgaagcctacagcgagatcggcatgaagggcgagcggagaagaggcaagggccacgatggcctgtaccagggcctgagcaccgccaccaaggacacctatgacgccctgcacatgcaggccctgcctccaagaagggccaagcgatctggatctggagcaacaaacttctcactactcaaacaagcaggtgacgtggaggagaatcccgggcctactagtatggactggatttggcgcatccttttccttgtcggcgctgctaccggcgcgcattccttcgaagcccagaccgtgacacagagccagcctgagatgtctgtgcaagaggccgagacagtgaccctgagctgcacctacgataccagcgagagcgactactacctgttctggtacaagcagcctcctagccggcagatgatcctggtcatccggcaagaagcctataagcagcagaacgccaccgagaacagattcagcgtgaacttccagaaggccgccaagagcttcagcctgaagatcagcgatagccagctgggcgacgccgccatgtacttttgcgcttatagaagcgccgtgaacgcccggctgatgtttggagatggcacacagctggtggtcaagcccaacacgcgtgcctcaacgaaagggcctagcgtcttccccctggcgccgtgctcacgatccacaagcgaatccaccgccgctctcggatgcctcgtaaaggattatttccctgaaccagtcacggtgtcatggaacagcggtgcccttaccagcggcgtccatacctttcctgctgtgctccagtccagcggactttatagtctcagctctgtcgtgaccgtcccttcctctaattttggcacccagacttacacgtgcaacgtcgatcataagcccagtaacaccaaggtagacaagacggtggaacgaaagggtacccagagttttgggttgttggaccctaaattgtgctatctgttggacggaatcctgttcatttacggagtgatcctgaccgcattgttcctgcgggttaagttttccagatccgcagacgcacccgcttaccaacaagggcagaaccaactctacaatgaacttaatttggggcggagggaagagtacgacgttctggacaaaaggaggggacgagatcccgagatgggcggaaagcctcagcgaaggaagaatccgcaagaggggctttataacgaactccagaaagataaaatggcagaagcctatagtgagattgggatgaagggagaaaggaggaggggtaaaggtcacgatgggttgtaccaaggattgagcacagccactaaagatacctatgatgcgctccacatgcaggccctgccgccaagacgcgccaagagaagcggatctggcgtgaagcagaccctgaatttcgacctgctgaagctggctggcgacgtggaatccaacccaggcccttctagaggccatatgaccgagtacaagcccacggtgcgcctcgccacccgcgacgacgtccccagggccgtacgcaccctcgccgccgcgttcgccgactaccccgccacgcgccacaccgtcgatccggaccgccacatcgagcgggtcaccgagctgcaagaactcttcctcacgcgcgtcgggctcgacatcggcaaggtgtgggtcgcggacgacggcgccgcggtggcggtctggaccacgccggagagcgtcgaagcgggggcggtgttcgccgagatcggcccgcgcatggccgagttgagcggttcccggctggccgcgcagcaacagatggaaggcctcctggcgccgcaccggcccaaggagcccgcgtggttcctggccaccgtcggcgtctcgcccgaccaccagggcaagggtctgggcagcgccgtcgtgctccccggagtggaggcggccgagcgcgccggggtgcccgccttcctggagacctccgcgccccgcaacctccccttctacgagcggctcggcttcaccgtcaccgccgacgtcgaggtgcccgaaggaccgcgcacctggtgcatgacccgcaagcccggtgcctga

SEQ ID NO: 9524 - DNA, 3138 bp, Artificial Sequence
  Synthetic Polynucleotide
atggccttaccagtgaccgccttgctcctgccgctggccttgctgctccacgccgccaggccggaagccgacatctaccagacacctagatacctggtcatcggcaccggcaagaaaatcaccctggaatgcagccagacaatgggccacgacaagatgtactggtatcagcaggaccccggcatggaactgcacctgatccactacagctacggcgtgaacagcaccgagaagggcgatctgtctagcgagagcaccgtgtccagaatcagaaccgagcacttcccactgacactggaaagcgccagacctagccacaccagccagtacctgtgtgcctcttctgaggccagaggactggccgagttcaccgacacacagtatttcggccctggcaccagactgaccgttctcgagggacagcctaaggccaatcctaccgtgacactgttccctccaagcagcgaagaactccaggccaacaaggccacacttgtgtgcctgatctccgacttctaccctggggctgtgacagtggcttggaaggccgatggatctcctgtgaaagccggcgtggaaaccaccaagccatccaagcagagcaacaacaaatacgccgccagctcctacctgagcctgacacctgagcagtggaagtcccacagatcctacagctgccaagtgacccacgaaggcagcaccgtggaaaagacagtggcccctacagagtgcagcggatcccagagcttcggcctgctggaccccaagctgtgctacctgctggatggcatcctgttcatctacggcgtgatcctgaccgccctgttcctgagagtgaagttcagcagaagcgccgacgcccctgcctaccagcagggacagaaccaactgtacaacgagctgaacctgggcagacgggaagagtacgacgtgctggacaagcggagaggcagggaccctgagatgggcggaaagccccagcggagaaagaacccccaggaaggactgtataacgaactccagaaagacaagatggccgaagcctacagcgagatcggcatgaagggcgagcggagaagaggcaagggccacgatggcctgtaccagggcctgagcaccgccaccaaggacacctatgacgccctgcacatgcaggccctgcctccaagaagggccaagcgatctggatctggagcaacaaacttctcactactcaaacaagcaggtgacgtggaggagaatcccgggcctactagtatggactggatttggcgcatccttttccttgtcggcgctgctaccggcgcgcattccttcgaagcccagaccgtgacacagagccagcctgagatgtctgtgcaagaggccgagacagtgaccctgagctgcacctacgataccagcgagagcgactactacctgttctggtacaagcagcctcctagccggcagatgatcctggtcatccggcaagaagcctataagcagcagaacgccaccgagaacagattcagcgtgaacttccagaaggccgccaagagcttcagcctgaagatcagcgatagccagctgggcgacgccgccatgtacttttgcgcttatagaagcgccgtgaacgcccggctgatgtttggagatggcacacagctggtggtcaagcccaacacgcgtgcgtcacctacgtccccaaaagtgttcccgctgtcactcgattccactccacaggacggtaacgtggtggttgcctgcctggtacaaggtttctttcctcaagaaccactctctgtgacgtggtctgaaagtggtcagaatgttacagcacggaacttcccaccgagtcaagatgcgagtggggatctctatacgacatccagtcaactcacactgcccgcaacacaatgccccgatggcaaatctgttacctgccatgtgaaacattacaccaatccatcccaggatgtgacagtaccttgtccggttccgccccctcccccgggtacccagagttttgggttgttggaccctaaattgtgctatctgttggacggaatcctgttcatttacggagtgatcctgaccgcattgttcctgcgggttaagttttccagatccgcagacgcacccgcttaccaacaagggcagaaccaactctacaatgaacttaatttggggcggagggaagagtacgacgttctggacaaaaggaggggacgagatcccgagatgggcggaaagcctcagcgaaggaagaatccgcaagaggggctttataacgaactccagaaagataaaatggcagaagcctatagtgagattgggatgaagggagaaaggaggaggggtaaaggtcacgatgggttgtaccaaggattgagcacagccactaaagatacctatgatgcgctccacatgcaggccctgccgccaagacgcgccaagagaagcggatctggcgtgaagcagaccctgaatttcgacctgctgaagctggctggcgacgtggaatccaacccaggcccttctagaggccatatgaccgagtacaagcccacggtgcgcctcgccacccgcgacgacgtccccagggccgtacgcaccctcgccgccgcgttcgccgactaccccgccacgcgccacaccgtcgatccggaccgccacatcgagcgggtcaccgagctgcaagaactcttcctcacgcgcgtcgggctcgacatcggcaaggtgtgggtcgcggacgacggcgccgcggtggcggtctggaccacgccggagagcgtcgaagcgggggcggtgttcgccgagatcggcccgcgcatggccgagttgagcggttcccggctggccgcgcagcaacagatggaaggcctcctggcgccgcaccggcccaaggagcccgcgtggttcctggccaccgtcggcgtctcgcccgaccaccagggcaagggtctgggcagcgccgtcgtgctccccggagtggaggcggccgagcgcgccggggtgcccgccttcctggagacctccgcgccccgcaacctccccttctacgagcggctcggcttcaccgtcaccgccgacgtcgaggtgcccgaaggaccgcgcacctggtgcatgacccgcaagcccggtgcctgagtcgac

SEQ ID NO: 9525 - DNA, 3117 bp, Artificial Sequence
  Synthetic Polynucleotide
atggccttaccagtgaccgccttgctcctgccgctggccttgctgctccacgccgccaggccggaagccgacatctaccagacacctagatacctggtcatcggcaccggcaagaaaatcaccctggaatgcagccagacaatgggccacgacaagatgtactggtatcagcaggaccccggcatggaactgcacctgatccactacagctacggcgtgaacagcaccgagaagggcgatctgtctagcgagagcaccgtgtccagaatcagaaccgagcacttcccactgacactggaaagcgccagacctagccacaccagccagtacctgtgtgcctcttctgaggccagaggactggccgagttcaccgacacacagtatttcggccctggcaccagactgaccgttctcgagggacagcctaaggccaatcctaccgtgacactgttccctccaagcagcgaagaactccaggccaacaaggccacacttgtgtgcctgatctccgacttctaccctggggctgtgacagtggcttggaaggccgatggatctcctgtgaaagccggcgtggaaaccaccaagccatccaagcagagcaacaacaaatacgccgccagctcctacctgagcctgacacctgagcagtggaagtcccacagatcctacagctgccaagtgacccacgaaggcagcaccgtggaaaagacagtggcccctacagagtgcagcggatcccagagcttcggcctgctggaccccaagctgtgctacctgctggatggcatcctgttcatctacggcgtgatcctgaccgccctgttcctgagagtgaagttcagcagaagcgccgacgcccctgcctaccagcagggacagaaccaactgtacaacgagctgaacctgggcagacgggaagagtacgacgtgctggacaagcggagaggcagggaccctgagatgggcggaaagccccagcggagaaagaacccccaggaaggactgtataacgaactccagaaagacaagatggccgaagcctacagcgagatcggcatgaagggcgagcggagaagaggcaagggccacgatggcctgtaccagggcctgagcaccgccaccaaggacacctatgacgccctgcacatgcaggccctgcctccaagaagggccaagcgatctggatctggagcaacaaacttctcactactcaaacaagcaggtgacgtggaggagaatcccgggcctactagtatggactggatttggcgcatccttttccttgtcggcgctgctaccggcgcgcattccttcgaagcccagaccgtgacacagagccagcctgagatgtctgtgcaagaggccgagacagtgaccctgagctgcacctacgataccagcgagagcgactactacctgttctggtacaagcagcctcctagccggcagatgatcctggtcatccggcaagaagcctataagcagcagaacgccaccgagaacagattcagcgtgaacttccagaaggccgccaagagcttcagcctgaagatcagcgatagccagctgggcgacgccgccatgtacttttgcgcttatagaagcgccgtgaacgcccggctgatgtttggagatggcacacagctggtggtcaagcccaacacgcgtgctagtacccagtcaccttctgttttcccgcttactagatgctgcaagaacataccatccaatgccacttctgtcacactgggctgtcttgctacaggttattttcctgagccggtgatggtcacttgggataccggtagcctgaatggaactacaatgacgctgcctgccacgacgctcacattgagtgggcattacgcgacaattagtcttttgacggtaagcggagcttgggctaagcagatgttcacttgcagagtagcgcacactccctctagtactgactgggttgacaacaaaaccttttctggtacccagagttttgggttgttggaccctaaattgtgctatctgttggacggaatcctgttcatttacggagtgatcctgaccgcattgttcctgcgggttaagttttccagatccgcagacgcacccgcttaccaacaagggcagaaccaactctacaatgaacttaatttggggcggagggaagagtacgacgttctggacaaaaggaggggacgagatcccgagatgggcggaaagcctcagcgaaggaagaatccgcaagaggggctttataacgaactccagaaagataaaatggcagaagcctatagtgagattgggatgaagggagaaaggaggaggggtaaaggtcacgatgggttgtaccaaggattgagcacagccactaaagatacctatgatgcgctccacatgcaggccctgccgccaagacgcgccaagagaagcggatctggcgtgaagcagaccctgaatttcgacctgctgaagctggctggcgacgtggaatccaacccaggcccttctagaggccatatgaccgagtacaagcccacggtgcgcctcgccacccgcgacgacgtccccagggccgtacgcaccctcgccgccgcgttcgccgactaccccgccacgcgccacaccgtcgatccggaccgccacatcgagcgggtcaccgagctgcaagaactcttcctcacgcgcgtcgggctcgacatcggcaaggtgtgggtcgcggacgacggcgccgcggtggcggtctggaccacgccggagagcgtcgaagcgggggcggtgttcgccgagatcggcccgcgcatggccgagttgagcggttcccggctggccgcgcagcaacagatggaaggcctcctggcgccgcaccggcccaaggagcccgcgtggttcctggccaccgtcggcgtctcgcccgaccaccagggcaagggtctgggcagcgccgtcgtgctccccggagtggaggcggccgagcgcgccggggtgcccgccttcctggagacctccgcgccccgcaacctccccttctacgagcggctcggcttcaccgtcaccgccgacgtcgaggtgcccgaaggaccgcgcacctggtgcatgacccgcaagcccggtgcctga

SEQ ID NO: 9526 - DNA, 3117 bp, Artificial Sequence
  Synthetic Polynucleotide
atggccttaccagtgaccgccttgctcctgccgctggccttgctgctccacgccgccaggccggaagccgacatctaccagacacctagatacctggtcatcggcaccggcaagaaaatcaccctggaatgcagccagacaatgggccacgacaagatgtactggtatcagcaggaccccggcatggaactgcacctgatccactacagctacggcgtgaacagcaccgagaagggcgatctgtctagcgagagcaccgtgtccagaatcagaaccgagcacttcccactgacactggaaagcgccagacctagccacaccagccagtacctgtgtgcctcttctgaggccagaggactggccgagttcaccgacacacagtatttcggccctggcaccagactgaccgttctcgagggacagcctaaggccaatcctaccgtgacactgttccctccaagcagcgaagaactccaggccaacaaggccacacttgtgtgcctgatctccgacttctaccctggggctgtgacagtggcttggaaggccgatggatctcctgtgaaagccggcgtggaaaccaccaagccatccaagcagagcaacaacaaatacgccgccagctcctacctgagcctgacacctgagcagtggaagtcccacagatcctacagctgccaagtgacccacgaaggcagcaccgtggaaaagacagtggcccctacagagtgcagcggatcccagagcttcggcctgctggaccccaagctgtgctacctgctggatggcatcctgttcatctacggcgtgatcctgaccgccctgttcctgagagtgaagttcagcagaagcgccgacgcccctgcctaccagcagggacagaaccaactgtacaacgagctgaacctgggcagacgggaagagtacgacgtgctggacaagcggagaggcagggaccctgagatgggcggaaagccccagcggagaaagaacccccaggaaggactgtataacgaactccagaaagacaagatggccgaagcctacagcgagatcggcatgaagggcgagcggagaagaggcaagggccacgatggcctgtaccagggcctgagcaccgccaccaaggacacctatgacgccctgcacatgcaggccctgcctccaagaagggccaagcgatctggatctggagcaacaaacttctcactactcaaacaagcaggtgacgtggaggagaatcccgggcctactagtatggactggatttggcgcatccttttccttgtcggcgctgctaccggcgcgcattccttcgaagcccagaccgtgacacagagccagcctgagatgtctgtgcaagaggccgagacagtgaccctgagctgcacctacgataccagcgagagcgactactacctgttctggtacaagcagcctcctagccggcagatgatcctggtcatccggcaagaagcctataagcagcagaacgccaccgagaacagattcagcgtgaacttccagaaggccgccaagagcttcagcctgaagatcagcgatagccagctgggcgacgccgccatgtacttttgcgcttatagaagcgccgtgaacgcccggctgatgtttggagatggcacacagctggtggtcaagcccaacacgcgtgcgtccactaagggtccgtcagtcttcccgctggcgccctgttcccgcagcacgagtgaatctaccgccgcccttgggtgcttggtaaaagactattttcctgagcccgttacagtatcatggaacagcggggctctgactagcggggtgcatacgttccctgcggttctgcaatctagcggactgtattctctctccagtgttgtgaccgtgccaagctccagcctcggtactaaaacttatacatgtaatgtggatcataaaccttcaaataccaaggttgacaaaagggtagagagtaagtacggtggtacccagagttttgggttgttggaccctaaattgtgctatctgttggacggaatcctgttcatttacggagtgatcctgaccgcattgttcctgcgggttaagttttccagatccgcagacgcacccgcttaccaacaagggcagaaccaactctacaatgaacttaatttggggcggagggaagagtacgacgttctggacaaaaggaggggacgagatcccgagatgggcggaaagcctcagcgaaggaagaatccgcaagaggggctttataacgaactccagaaagataaaatggcagaagcctatagtgagattgggatgaagggagaaaggaggaggggtaaaggtcacgatgggttgtaccaaggattgagcacagccactaaagatacctatgatgcgctccacatgcaggccctgccgccaagacgcgccaagagaagcggatctggcgtgaagcagaccctgaatttcgacctgctgaagctggctggcgacgtggaatccaacccaggcccttctagaggccatatgaccgagtacaagcccacggtgcgcctcgccacccgcgacgacgtccccagggccgtacgcaccctcgccgccgcgttcgccgactaccccgccacgcgccacaccgtcgatccggaccgccacatcgagcgggtcaccgagctgcaagaactcttcctcacgcgcgtcgggctcgacatcggcaaggtgtgggtcgcggacgacggcgccgcggtggcggtctggaccacgccggagagcgtcgaagcgggggcggtgttcgccgagatcggcccgcgcatggccgagttgagcggttcccggctggccgcgcagcaacagatggaaggcctcctggcgccgcaccggcccaaggagcccgcgtggttcctggccaccgtcggcgtctcgcccgaccaccagggcaagggtctgggcagcgccgtcgtgctccccggagtggaggcggccgagcgcgccggggtgcccgccttcctggagacctccgcgccccgcaacctccccttctacgagcggctcggcttcaccgtcaccgccgacgtcgaggtgcccgaaggaccgcgcacctggtgcatgacccgcaagcccggtgcctga

SEQ ID NO: 9527 - DNA, 3117 bp, Artificial Sequence
  Synthetic Polynucleotide
atggccttaccagtgaccgccttgctcctgccgctggccttgctgctccacgccgccaggccggaagccgacatctaccagacacctagatacctggtcatcggcaccggcaagaaaatcaccctggaatgcagccagacaatgggccacgacaagatgtactggtatcagcaggaccccggcatggaactgcacctgatccactacagctacggcgtgaacagcaccgagaagggcgatctgtctagcgagagcaccgtgtccagaatcagaaccgagcacttcccactgacactggaaagcgccagacctagccacaccagccagtacctgtgtgcctcttctgaggccagaggactggccgagttcaccgacacacagtatttcggccctggcaccagactgaccgttctcgagggacagcctaaggccaatcctaccgtgacactgttccctccaagcagcgaagaactccaggccaacaaggccacacttgtgtgcctgatctccgacttctaccctggggctgtgacagtggcttggaaggccgatggatctcctgtgaaagccggcgtggaaaccaccaagccatccaagcagagcaacaacaaatacgccgccagctcctacctgagcctgacacctgagcagtggaagtcccacagatcctacagctgccaagtgacccacgaaggcagcaccgtggaaaagacagtggcccctacagagtgcagcggatcccagagcttcggcctgctggaccccaagctgtgctacctgctggatggcatcctgttcatctacggcgtgatcctgaccgccctgttcctgagagtgaagttcagcagaagcgccgacgcccctgcctaccagcagggacagaaccaactgtacaacgagctgaacctgggcagacgggaagagtacgacgtgctggacaagcggagaggcagggaccctgagatgggcggaaagccccagcggagaaagaacccccaggaaggactgtataacgaactccagaaagacaagatggccgaagcctacagcgagatcggcatgaagggcgagcggagaagaggcaagggccacgatggcctgtaccagggcctgagcaccgccaccaaggacacctatgacgccctgcacatgcaggccctgcctccaagaagggccaagcgatctggatctggagcaacaaacttctcactactcaaacaagcaggtgacgtggaggagaatcccgggcctactagtatggactggatttggcgcatccttttccttgtcggcgctgctaccggcgcgcattccttcgaagcccagaccgtgacacagagccagcctgagatgtctgtgcaagaggccgagacagtgaccctgagctgcacctacgataccagcgagagcgactactacctgttctggtacaagcagcctcctagccggcagatgatcctggtcatccggcaagaagcctataagcagcagaacgccaccgagaacagattcagcgtgaacttccagaaggccgccaagagcttcagcctgaagatcagcgatagccagctgggcgacgccgccatgtacttttgcgcttatagaagcgccgtgaacgcccggctgatgtttggagatggcacacagctggtggtcaagcccaacacgcgtgcaagtacaaagggacccagtgttttcccgctcgccccctgttcacgatcaacgagtgagtccactgcggctctcggatgcctcgtcaaagactacttccccgagccggtgactgttagttggaactctggggctcttacttcaggcgtacacacattccccgccgtgcttcagtcaagtgggctctactcacttagcagtgtggtaacggttccctctagcaactttggcacccaaacatatacttgcaacgtcgatcacaagccgtcaaataccaaagttgacaagaccgttgaaaggaaatgttgtggtacccagagttttgggttgttggaccctaaattgtgctatctgttggacggaatcctgttcatttacggagtgatcctgaccgcattgttcctgcgggttaagttttccagatccgcagacgcacccgcttaccaacaagggcagaaccaactctacaatgaacttaatttggggcggagggaagagtacgacgttctggacaaaaggaggggacgagatcccgagatgggcggaaagcctcagcgaaggaagaatccgcaagaggggctttataacgaactccagaaagataaaatggcagaagcctatagtgagattgggatgaagggagaaaggaggaggggtaaaggtcacgatgggttgtaccaaggattgagcacagccactaaagatacctatgatgcgctccacatgcaggccctgccgccaagacgcgccaagagaagcggatctggcgtgaagcagaccctgaatttcgacctgctgaagctggctggcgacgtggaatccaacccaggcccttctagaggccatatgaccgagtacaagcccacggtgcgcctcgccacccgcgacgacgtccccagggccgtacgcaccctcgccgccgcgttcgccgactaccccgccacgcgccacaccgtcgatccggaccgccacatcgagcgggtcaccgagctgcaagaactcttcctcacgcgcgtcgggctcgacatcggcaaggtgtgggtcgcggacgacggcgccgcggtggcggtctggaccacgccggagagcgtcgaagcgggggcggtgttcgccgagatcggcccgcgcatggccgagttgagcggttcccggctggccgcgcagcaacagatggaaggcctcctggcgccgcaccggcccaaggagcccgcgtggttcctggccaccgtcggcgtctcgcccgaccaccagggcaagggtctgggcagcgccgtcgtgctccccggagtggaggcggccgagcgcgccggggtgcccgccttcctggagacctccgcgccccgcaacctccccttctacgagcggctcggcttcaccgtcaccgccgacgtcgaggtgcccgaaggaccgcgcacctggtgcatgacccgcaagcccggtgcctga

SEQ ID NO: 9528 - DNA, 3162 bp, Artificial Sequence
  Synthetic Polynucleotide
atggccttaccagtgaccgccttgctcctgccgctggccttgctgctccacgccgccaggccggaagccgacatctaccagacacctagatacctggtcatcggcaccggcaagaaaatcaccctggaatgcagccagacaatgggccacgacaagatgtactggtatcagcaggaccccggcatggaactgcacctgatccactacagctacggcgtgaacagcaccgagaagggcgatctgtctagcgagagcaccgtgtccagaatcagaaccgagcacttcccactgacactggaaagcgccagacctagccacaccagccagtacctgtgtgcctcttctgaggccagaggactggccgagttcaccgacacacagtatttcggccctggcaccagactgaccgttctcgaggacctgaagaacgtgttcccacctgaggtggccgtgttcgagcctagcgaggccgagatcagccacacccagaaagccaccctcgtgtgcctggctaccggcttctaccccgaccatgtggaactgtcttggtgggtcaacggcaaagaggtgcacagcggcgtgtctaccgacccccagccactgaaagaacagcccgccctgaacgacagccggtactgcctgagcagcagactgagagtgtccgccaccttctggcagaacccccggaaccacttcagatgccaggtgcagttctacggcctgagcgagaacgacgagtggacccaggacagagccaagcccgtgacccagatcgtgtctgccgaagcctggggcagagccgattgcggatcccagagcttcggcctgctggaccccaagctgtgctacctgctggatggcatcctgttcatctacggcgtgatcctgaccgccctgttcctgagagtgaagttcagcagaagcgccgacgcccctgcctaccagcagggacagaaccaactgtacaacgagctgaacctgggcagacgggaagagtacgacgtgctggacaagcggagaggcagggaccctgagatgggcggaaagccccagcggagaaagaacccccaggaaggactgtataacgaactccagaaagacaagatggccgaagcctacagcgagatcggcatgaagggcgagcggagaagaggcaagggccacgatggcctgtaccagggcctgagcaccgccaccaaggacacctatgacgccctgcacatgcaggccctgcctccaagaagggccaagcgatctggatctggagcaacaaacttctcactactcaaacaagcaggtgacgtggaggagaatcccgggcctactagtatggactggatttggcgcatccttttccttgtcggcgctgctaccggcgcgcattccttcgaagcccagaccgtgacacagagccagcctgagatgtctgtgcaagaggccgagacagtgaccctgagctgcacctacgataccagcgagagcgactactacctgttctggtacaagcagcctcctagccggcagatgatcctggtcatccggcaagaagcctataagcagcagaacgccaccgagaacagattcagcgtgaacttccagaaggccgccaagagcttcagcctgaagatcagcgatagccagctgggcgacgccgccatgtacttttgcgcttatagaagcgccgtgaacgcccggctgatgtttggagatggcacacagctggtggtcaagcccaacacgcgtatccagaaccctgatcctgccgtgtaccagctgcgggatagcaagagcagcgacaagagcgtgtgtctgttcaccgacttcgacagccagaccaacgtgtcccagagcaaggactccgacgtgtacatcaccgataagaccgtgctggacatgcggagcatggacttcaagagcaactccgccgtggcctggtccaacaagtccgatttcgcctgcgccaacgccttcaacaacagcattatccccgaggacacattcttcccaagccccgagagcagctgcggtacccagagttttgggttgttggaccctaaattgtgctatctgttggacggaatcctgttcatttacggagtgatcctgaccgcattgttcctgcgggttaagttttccagatccgcagacgcacccgcttaccaacaagggcagaaccaactctacaatgaacttaatttggggcggagggaagagtacgacgttctggacaaaaggaggggacgagatcccgagatgggcggaaagcctcagcgaaggaagaatccgcaagaggggctttataacgaactccagaaagataaaatggcagaagcctatagtgagattgggatgaagggagaaaggaggaggggtaaaggtcacgatgggttgtaccaaggattgagcacagccactaaagatacctatgatgcgctccacatgcaggccctgccgccaagacgcgccaagagaagcggatctggcgtgaagcagaccctgaatttcgacctgctgaagctggctggcgacgtggaatccaacccaggcccttctagaggccatatgaccgagtacaagcccacggtgcgcctcgccacccgcgacgacgtccccagggccgtacgcaccctcgccgccgcgttcgccgactaccccgccacgcgccacaccgtcgatccggaccgccacatcgagcgggtcaccgagctgcaagaactcttcctcacgcgcgtcgggctcgacatcggcaaggtgtgggtcgcggacgacggcgccgcggtggcggtctggaccacgccggagagcgtcgaagcgggggcggtgttcgccgagatcggcccgcgcatggccgagttgagcggttcccggctggccgcgcagcaacagatggaaggcctcctggcgccgcaccggcccaaggagcccgcgtggttcctggccaccgtcggcgtctcgcccgaccaccagggcaagggtctgggcagcgccgtcgtgctccccggagtggaggcggccgagcgcgccggggtgcccgccttcctggagacctccgcgccccgcaacctccccttctacgagcggctcggcttcaccgtcaccgccgacgtcgaggtgcccgaaggaccgcgcacctggtgcatgacccgcaagcccggtgcctga

SEQ ID NO: 9529 - DNA, 3162 bp, Artificial Sequence
  Synthetic Polynucleotide
atggccttaccagtgaccgccttgctcctgccgctggccttgctgctccacgccgccaggccggaagccgacatctaccagacacctagatacctggtcatcggcaccggcaagaaaatcaccctggaatgcagccagacaatgggccacgacaagatgtactggtatcagcaggaccccggcatggaactgcacctgatccactacagctacggcgtgaacagcaccgagaagggcgatctgtctagcgagagcaccgtgtccagaatcagaaccgagcacttcccactgacactggaaagcgccagacctagccacaccagccagtacctgtgtgcctcttctgaggccagaggactggccgagttcaccgacacacagtatttcggccctggcaccagactgaccgttctcgaggacctgaagaacgtgttcccacctgaggtggccgtgttcgagcctagcaaggccgagatcgcccacacccagaaagccaccctcgtgtgcctggctaccggcttctaccccgaccatgtggaactgtcttggtgggtcaacggcaaagaggtgcacagcggcgtgtgtaccgacccccagccactgaaagaacagcccgccctgaacgacagccggtactgcctgagcagcagactgagagtgtccgccaccttctggcagaacccccggaaccacttcagatgccaggtgcagttctacggcctgagcgagaacgacgagtggacccaggacagagccaagcccgtgacccagatcgtgtctgccgaagcctggggcagagccgattgcggatcccagagcttcggcctgctggaccccaagctgtgctacctgctggatggcatcctgttcatctacggcgtgatcctgaccgccctgttcctgagagtgaagttcagcagaagcgccgacgcccctgcctaccagcagggacagaaccaactgtacaacgagctgaacctgggcagacgggaagagtacgacgtgctggacaagcggagaggcagggaccctgagatgggcggaaagccccagcggagaaagaacccccaggaaggactgtataacgaactccagaaagacaagatggccgaagcctacagcgagatcggcatgaagggcgagcggagaagaggcaagggccacgatggcctgtaccagggcctgagcaccgccaccaaggacacctatgacgccctgcacatgcaggccctgcctccaagaagggccaagcgatctggatctggagcaacaaacttctcactactcaaacaagcaggtgacgtggaggagaatcccgggcctactagtatggactggatttggcgcatccttttccttgtcggcgctgctaccggcgcgcattccttcgaagcccagaccgtgacacagagccagcctgagatgtctgtgcaagaggccgagacagtgaccctgagctgcacctacgataccagcgagagcgactactacctgttctggtacaagcagcctcctagccggcagatgatcctggtcatccggcaagaagcctataagcagcagaacgccaccgagaacagattcagcgtgaacttccagaaggccgccaagagcttcagcctgaagatcagcgatagccagctgggcgacgccgccatgtacttttgcgcttatagaagcgccgtgaacgcccggctgatgtttggagatggcacacagctggtggtcaagcccaacacgcgtatccagaaccctgatcctgccgtgtaccagctgcgggatagcaagagcagcgacaagagcgtgtgtctgttcaccgacttcgacagccagaccaacgtgtcccagagcaaggactccgacgtgtacatcaccgataagtgcgtgctggacatgcggagcatggacttcaagagcaactccgccgtggcctggtccaacaagtccgatttcgcctgcgccaacgccttcaacaacagcattatccccgaggacacattcttcccaagcagcgacgtgccctgcggtacccagagttttgggttgttggaccctaaattgtgctatctgttggacggaatcctgttcatttacggagtgatcctgaccgcattgttcctgcgggttaagttttccagatccgcagacgcacccgcttaccaacaagggcagaaccaactctacaatgaacttaatttggggcggagggaagagtacgacgttctggacaaaaggaggggacgagatcccgagatgggcggaaagcctcagcgaaggaagaatccgcaagaggggctttataacgaactccagaaagataaaatggcagaagcctatagtgagattgggatgaagggagaaaggaggaggggtaaaggtcacgatgggttgtaccaaggattgagcacagccactaaagatacctatgatgcgctccacatgcaggccctgccgccaagacgcgccaagagaagcggatctggcgtgaagcagaccctgaatttcgacctgctgaagctggctggcgacgtggaatccaacccaggcccttctagaggccatatgaccgagtacaagcccacggtgcgcctcgccacccgcgacgacgtccccagggccgtacgcaccctcgccgccgcgttcgccgactaccccgccacgcgccacaccgtcgatccggaccgccacatcgagcgggtcaccgagctgcaagaactcttcctcacgcgcgtcgggctcgacatcggcaaggtgtgggtcgcggacgacggcgccgcggtggcggtctggaccacgccggagagcgtcgaagcgggggcggtgttcgccgagatcggcccgcgcatggccgagttgagcggttcccggctggccgcgcagcaacagatggaaggcctcctggcgccgcaccggcccaaggagcccgcgtggttcctggccaccgtcggcgtctcgcccgaccaccagggcaagggtctgggcagcgccgtcgtgctccccggagtggaggcggccgagcgcgccggggtgcccgccttcctggagacctccgcgccccgcaacctccccttctacgagcggctcggcttcaccgtcaccgccgacgtcgaggtgcccgaaggaccgcgcacctggtgcatgacccgcaagcccggtgcctga

SEQ ID NO: 9530 - DNA, 2460 bp, Artificial Sequence
  Synthetic Polynucleotide
atggccttaccagtgaccgccttgctcctgccgctggccttgctgctccacgccgccaggccggaagccgacatctaccagacacctagatacctggtcatcggcaccggcaagaaaatcaccctggaatgcagccagacaatgggccacgacaagatgtactggtatcagcaggaccccggcatggaactgcacctgatccactacagctacggcgtgaacagcaccgagaagggcgatctgtctagcgagagcaccgtgtccagaatcagaaccgagcacttcccactgacactggaaagcgccagacctagccacaccagccagtacctgtgtgcctcttctgaggccagaggactggccgagttcaccgacacacagtatttcggccctggcaccagactgaccgttctcgaggacctgaagaacgtgttcccacctgaggtggccgtgttcgagcctagcgaggccgagatcagccacacccagaaagccaccctcgtgtgcctggctaccggcttctaccccgaccatgtggaactgtcttggtgggtcaacggcaaagaggtgcacagcggcgtgtgtaccgacccccagccactgaaagaacagcccgccctgaacgacagccggtactgcctgagcagcagactgagagtgtccgccaccttctggcagaacccccggaaccacttcagatgccaggtgcagttctacggcctgagcgagaacgacgagtggacccaggacagagccaagcccgtgacccagatcgtgtctgccgaagcctggggcagagccgattgcggatcccagagcttcggcctgctggaccccaagctgtgctacctgctggatggcatcctgttcatctacggcgtgatcctgaccgccctgttcctgagagtgaagttcagcagaagcgccgacgcccctgcctaccagcagggacagaaccaactgtacaacgagctgaacctgggcagacgggaagagtacgacgtgctggacaagcggagaggcagggaccctgagatgggcggaaagccccagcggagaaagaacccccaggaaggactgtataacgaactccagaaagacaagatggccgaagcctacagcgagatcggcatgaagggcgagcggagaagaggcaagggccacgatggcctgtaccagggcctgagcaccgccaccaaggacacctatgacgccctgcacatgcaggccctgcctccaagaagggccaagcgatctggatctggagcaacaaacttctcactactcaaacaagcaggtgacgtggaggagaatcccgggcctactagtatggactggatttggcgcatccttttccttgtcggcgctgctaccggcgcgcattccttcgaagcccagaccgtgacacagagccagcctgagatgtctgtgcaagaggccgagacagtgaccctgagctgcacctacgataccagcgagagcgactactacctgttctggtacaagcagcctcctagccggcagatgatcctggtcatccggcaagaagcctataagcagcagaacgccaccgagaacagattcagcgtgaacttccagaaggccgccaagagcttcagcctgaagatcagcgatagccagctgggcgacgccgccatgtacttttgcgcttatagaagcgccgtgaacgcccggctgatgtttggagatggcacacagctggtggtcaagcccaacacgcgtatccagaaccctgatcctgccgtgtaccagctgcgggatagcaagagcagcgacaagagcgtgtgtctgttcaccgacttcgacagccagaccaacgtgtcccagagcaaggactccgacgtgtacatcaccgataagtgcgtgctggacatgcggagcatggacttcaagagcaactccgccgtggcctggtccaacaagtccgatttcgcctgcgccaacgccttcaacaacagcattatccccgaggacacattcttcccaagccccgagagcagctgcggtacccagagttttgggttgttggaccctaaattgtgctatctgttggacggaatcctgttcatttacggagtgatcctgaccgcattgttcctgcgggttaagttttccagatccgcagacgcacccgcttaccaacaagggcagaaccaactctacaatgaacttaatttggggcggagggaagagtacgacgttctggacaaaaggaggggacgagatcccgagatgggcggaaagcctcagcgaaggaagaatccgcaagaggggctttataacgaactccagaaagataaaatggcagaagcctatagtgagattgggatgaagggagaaaggaggaggggtaaaggtcacgatgggttgtaccaaggattgagcacagccactaaagatacctatgatgcgctccacatgcaggccctgccgccaaga

SEQ ID NO: 9531 - DNA, 2478 bp, Artificial Sequence
  Synthetic Polynucleotide
atggccttaccagtgaccgccttgctcctgccgctggccttgctgctccacgccgccaggccggaagccgacatctaccagacacctagatacctggtcatcggcaccggcaagaaaatcaccctggaatgcagccagacaatgggccacgacaagatgtactggtatcagcaggaccccggcatggaactgcacctgatccactacagctacggcgtgaacagcaccgagaagggcgatctgtctagcgagagcaccgtgtccagaatcagaaccgagcacttcccactgacactggaaagcgccagacctagccacaccagccagtacctgtgtgcctcttctgaggccagaggactggccgagttcaccgacacacagtatttcggccctggcaccagactgaccgttctcgagcagagcttcggcctgctggaccccaagctgtgctacctgctggatggcatcctgttcatctacggcgtgatcctgaccgccctgttcctgagagtgaagttcagcagaagcgccgacgcccctgcctaccagcagggacagaaccaactgtacaacgagctgaacctgggcagacgggaagagtacgacgtgctggacaagcggagaggcagggaccctgagatgggcggaaagccccagcggagaaagaacccccaggaaggactgtataacgaactccagaaagacaagatggccgaagcctacagcgagatcggcatgaagggcgagcggagaagaggcaagggccacgatggcctgtaccagggcctgagcaccgccaccaaggacacctatgacgccctgcacatgcaggccctgcctccaagaagggccaagcgatctggatctggagcaacaaacttctcactactcaaacaagcaggtgacgtggaggagaatcccgggcctactagtatggactggatttggcgcatccttttccttgtcggcgctgctaccggcgcgcattccttcgaagcccagaccgtgacacagagccagcctgagatgtctgtgcaagaggccgagacagtgaccctgagctgcacctacgataccagcgagagcgactactacctgttctggtacaagcagcctcctagccggcagatgatcctggtcatccggcaagaagcctataagcagcagaacgccaccgagaacagattcagcgtgaacttccagaaggccgccaagagcttcagcctgaagatcagcgatagccagctgggcgacgccgccatgtacttttgcgcttatagaagcgccgtgaacgcccggctgatgtttggagatggcacacagctggtggtcaagcccaacacgcgtcagagttttgggttgttggaccctaaattgtgctatctgttggacggaatcctgttcatttacggagtgatcctgaccgcattgttcctgcgggttaagttttccagatccgcagacgcacccgcttaccaacaagggcagaaccaactctacaatgaacttaatttggggcggagggaagagtacgacgttctggacaaaaggaggggacgagatcccgagatgggcggaaagcctcagcgaaggaagaatccgcaagaggggctttataacgaactccagaaagataaaatggcagaagcctatagtgagattgggatgaagggagaaaggaggaggggtaaaggtcacgatgggttgtaccaaggattgagcacagccactaaagatacctatgatgcgctccacatgcaggccctgccgccaagacgcgccaagagaagcggatctggcgtgaagcagaccctgaatttcgacctgctgaagctggctggcgacgtggaatccaacccaggcccttctagaggccatatgaccgagtacaagcccacggtgcgcctcgccacccgcgacgacgtccccagggccgtacgcaccctcgccgccgcgttcgccgactaccccgccacgcgccacaccgtcgatccggaccgccacatcgagcgggtcaccgagctgcaagaactcttcctcacgcgcgtcgggctcgacatcggcaaggtgtgggtcgcggacgacggcgccgcggtggcggtctggaccacgccggagagcgtcgaagcgggggcggtgttcgccgagatcggcccgcgcatggccgagttgagcggttcccggctggccgcgcagcaacagatggaaggcctcctggcgccgcaccggcccaaggagcccgcgtggttcctggccaccgtcggcgtctcgcccgaccaccagggcaagggtctgggcagcgccgtcgtgctccccggagtggaggcggccgagcgcgccggggtgcccgccttcctggagacctccgcgccccgcaacctccccttctacgagcggctcggcttcaccgtcaccgccgacgtcgaggtgcccgaaggaccgcgcacctggtgcatgacccgcaagcccggtgcctga

SEQ ID NO: 9532 - DNA, 2583 bp, Artificial Sequence
  Synthetic Polynucleotide
atggccttaccagtgaccgccttgctcctgccgctggccttgctgctccacgccgccaggccggaagccgacatctaccagacacctagatacctggtcatcggcaccggcaagaaaatcaccctggaatgcagccagacaatgggccacgacaagatgtactggtatcagcaggaccccggcatggaactgcacctgatccactacagctacggcgtgaacagcaccgagaagggcgatctgtctagcgagagcaccgtgtccagaatcagaaccgagcacttcccactgacactggaaagcgccagacctagccacaccagccagtacctgtgtgcctcttctgaggccagaggactggccgagttcaccgacacacagtatttcggccctggcaccagactgaccgttctcgaggacctgaagaacgtgttcccacctgaggtggccgtgttcgagcctagcgaggccgagatcagccacacccagaaagccaccctcgtgtgcctggctaccggcttctaccccgaccatgtggaactgtcttggtgggtcaacggcaaagaggtgcacagcggcgtgtgtaccgacccccagccactgaaagaacagcccgccctgaacgacagccggtactgcctgagcagcagactgagagtgtccgccaccttctggcagaacccccggaaccacttcagatgccaggtgcagttctacggcctgagcgagaacgacgagtggacccaggacagagccaagcccgtgacccagatcgtgtctgccgaagcctggggcagagccgattgcggatcccagagcttcggcctgctggaccccaagctgtgctacctgctggatggcatcctgttcatctacggcgtgatcctgaccgccctgttcctgaggagtaagaggagcaggctcctgcacagtgactacatgaacatgactccacgccgccccggacccacccgcaagcattaccagccctatgccccaccacgcgacttcgcagcctatcgctccagagtgaagttcagcagaagcgccgacgcccctgcctaccagcagggacagaaccaactgtacaacgagctgaacctgggcagacgggaagagtacgacgtgctggacaagcggagaggcagggaccctgagatgggcggaaagccccagcggagaaagaacccccaggaaggactgtataacgaactccagaaagacaagatggccgaagcctacagcgagatcggcatgaagggcgagcggagaagaggcaagggccacgatggcctgtaccagggcctgagcaccgccaccaaggacacctatgacgccctgcacatgcaggccctgcctccaagaagggccaagcgatctggatctggagcaacaaacttctcactactcaaacaagcaggtgacgtggaggagaatcccgggcctactagtatggactggatttggcgcatccttttccttgtcggcgctgctaccggcgcgcattccttcgaagcccagaccgtgacacagagccagcctgagatgtctgtgcaagaggccgagacagtgaccctgagctgcacctacgataccagcgagagcgactactacctgttctggtacaagcagcctcctagccggcagatgatcctggtcatccggcaagaagcctataagcagcagaacgccaccgagaacagattcagcgtgaacttccagaaggccgccaagagcttcagcctgaagatcagcgatagccagctgggcgacgccgccatgtacttttgcgcttatagaagcgccgtgaacgcccggctgatgtttggagatggcacacagctggtggtcaagcccaacacgcgtatccagaaccctgatcctgccgtgtaccagctgcgggatagcaagagcagcgacaagagcgtgtgtctgttcaccgacttcgacagccagaccaacgtgtcccagagcaaggactccgacgtgtacatcaccgataagtgcgtgctggacatgcggagcatggacttcaagagcaactccgccgtggcctggtccaacaagtccgatttcgcctgcgccaacgccttcaacaacagcattatccccgaggacacattcttcccaagccccgagagcagctgcggtacccagagttttgggttgttggaccctaaattgtgctatctgttggacggaatcctgttcatttacggagtgatcctgaccgcattgttcctgcgggttaagttttccagatccgcagacgcacccgcttaccaacaagggcagaaccaactctacaatgaacttaatttggggcggagggaagagtacgacgttctggacaaaaggaggggacgagatcccgagatgggcggaaagcctcagcgaaggaagaatccgcaagaggggctttataacgaactccagaaagataaaatggcagaagcctatagtgagattgggatgaagggagaaaggaggaggggtaaaggtcacgatgggttgtaccaaggattgagcacagccactaaagatacctatgatgcgctccacatgcaggccctgccgccaaga

SEQ ID NO: 9533 - DNA, 2706 bp, Artificial Sequence
  Synthetic Polynucleotide
atggccttaccagtgaccgccttgctcctgccgctggccttgctgctccacgccgccaggccggaagccgacatctaccagacacctagatacctggtcatcggcaccggcaagaaaatcaccctggaatgcagccagacaatgggccacgacaagatgtactggtatcagcaggaccccggcatggaactgcacctgatccactacagctacggcgtgaacagcaccgagaagggcgatctgtctagcgagagcaccgtgtccagaatcagaaccgagcacttcccactgacactggaaagcgccagacctagccacaccagccagtacctgtgtgcctcttctgaggccagaggactggccgagttcaccgacacacagtatttcggccctggcaccagactgaccgttctcgaggacctgaagaacgtgttcccacctgaggtggccgtgttcgagcctagcgaggccgagatcagccacacccagaaagccaccctcgtgtgcctggctaccggcttctaccccgaccatgtggaactgtcttggtgggtcaacggcaaagaggtgcacagcggcgtgtgtaccgacccccagccactgaaagaacagcccgccctgaacgacagccggtactgcctgagcagcagactgagagtgtccgccaccttctggcagaacccccggaaccacttcagatgccaggtgcagttctacggcctgagcgagaacgacgagtggacccaggacagagccaagcccgtgacccagatcgtgtctgccgaagcctggggcagagccgattgcggatcccagagcttcggcctgctggaccccaagctgtgctacctgctggatggcatcctgttcatctacggcgtgatcctgaccgccctgttcctgaggagtaagaggagcaggctcctgcacagtgactacatgaacatgactccacgccgccccggacccacccgcaagcattaccagccctatgccccaccacgcgacttcgcagcctatcgctccagagtgaagttcagcagaagcgccgacgcccctgcctaccagcagggacagaaccaactgtacaacgagctgaacctgggcagacgggaagagtacgacgtgctggacaagcggagaggcagggaccctgagatgggcggaaagccccagcggagaaagaacccccaggaaggactgtataacgaactccagaaagacaagatggccgaagcctacagcgagatcggcatgaagggcgagcggagaagaggcaagggccacgatggcctgtaccagggcctgagcaccgccaccaaggacacctatgacgccctgcacatgcaggccctgcctccaagaagggccaagcgatctggatctggagcaacaaacttctcactactcaaacaagcaggtgacgtggaggagaatcccgggcctactagtatggactggatttggcgcatccttttccttgtcggcgctgctaccggcgcgcattccttcgaagcccagaccgtgacacagagccagcctgagatgtctgtgcaagaggccgagacagtgaccctgagctgcacctacgataccagcgagagcgactactacctgttctggtacaagcagcctcctagccggcagatgatcctggtcatccggcaagaagcctataagcagcagaacgccaccgagaacagattcagcgtgaacttccagaaggccgccaagagcttcagcctgaagatcagcgatagccagctgggcgacgccgccatgtacttttgcgcttatagaagcgccgtgaacgcccggctgatgtttggagatggcacacagctggtggtcaagcccaacacgcgtatccagaaccctgatcctgccgtgtaccagctgcgggatagcaagagcagcgacaagagcgtgtgtctgttcaccgacttcgacagccagaccaacgtgtcccagagcaaggactccgacgtgtacatcaccgataagtgcgtgctggacatgcggagcatggacttcaagagcaactccgccgtggcctggtccaacaagtccgatttcgcctgcgccaacgccttcaacaacagcattatccccgaggacacattcttcccaagccccgagagcagctgcggtacccagagttttgggttgttggaccctaaattgtgctatctgttggacggaatcctgttcatttacggagtgatcctgaccgcattgttcctgaggagcaagcggtcacggctgctccacagcgattacatgaatatgacaccacgaagaccgggtcctactcgcaaacactaccaaccctacgcacctccccgcgactttgcagcgtaccgatctcgggttaagttttccagatccgcagacgcacccgcttaccaacaagggcagaaccaactctacaatgaacttaatttggggcggagggaagagtacgacgttctggacaaaaggaggggacgagatcccgagatgggcggaaagcctcagcgaaggaagaatccgcaagaggggctttataacgaactccagaaagataaaatggcagaagcctatagtgagattgggatgaagggagaaaggaggaggggtaaaggtcacgatgggttgtaccaaggattgagcacagccactaaagatacctatgatgcgctccacatgcaggccctgccgccaaga

SEQ ID NO: 9534 - DNA, 2460 bp, Artificial Sequence
  Synthetic Polynucleotide
atggccttaccagtgaccgccttgctcctgccgctggccttgctgctccacgccgccaggccggaagccgacatctaccagacacctagatacctggtcatcggcaccggcaagaaaatcaccctggaatgcagccagacaatgggccacgacaagatgtactggtatcagcaggaccccggcatggaactgcacctgatccactacagctacggcgtgaacagcaccgagaagggcgatctgtctagcgagagcaccgtgtccagaatcagaaccgagcacttcccactgacactggaaagcgccagacctagccacaccagccagtacctgtgtgcctcttctgaggccagaggactggccgagttcaccgacacacagtatttcggccctggcaccagactgaccgttctcgaggacctgaagaacgtgttcccacctgaggtggccgtgttcgagcctagcgaggccgagatcagccacacccagaaagccaccctcgtgtgcctggctaccggcttctaccccgaccatgtggaactgtcttggtgggtcaacggcaaagaggtgcacagcggcgtgtctaccgacccccagccactgaaagaacagcccgccctgaacgacagccggtactgcctgagcagcagactgagagtgtccgccaccttctggcagaacccccggaaccacttcagatgccaggtgcagttctacggcctgagcgagaacgacgagtggacccaggacagagccaagcccgtgacccagatcgtgtctgccgaagcctggggcagagccgattgcggatcccagagcttcggcctgctggaccccaagctgtgctacctgctggatggcatcctgttcatctacggcgtgatcctgaccgccctgttcctgagagtgaagttcagcagaagcgccgacgcccctgcctaccagcagggacagaaccaactgtacaacgagctgaacctgggcagacgggaagagtacgacgtgctggacaagcggagaggcagggaccctgagatgggcggaaagccccagcggagaaagaacccccaggaaggactgtataacgaactccagaaagacaagatggccgaagcctacagcgagatcggcatgaagggcgagcggagaagaggcaagggccacgatggcctgtaccagggcctgagcaccgccaccaaggacacctatgacgccctgcacatgcaggccctgcctccaagaagggccaagcgatctggatctggagcaacaaacttctcactactcaaacaagcaggtgacgtggaggagaatcccgggcctactagtatggactggatttggcgcatccttttccttgtcggcgctgctaccggcgcgcattccttcgaagcccagaccgtgacacagagccagcctgagatgtctgtgcaagaggccgagacagtgaccctgagctgcacctacgataccagcgagagcgactactacctgttctggtacaagcagcctcctagccggcagatgatcctggtcatccggcaagaagcctataagcagcagaacgccaccgagaacagattcagcgtgaacttccagaaggccgccaagagcttcagcctgaagatcagcgatagccagctgggcgacgccgccatgtacttttgcgcttatagaagcgccgtgaacgcccggctgatgtttggagatggcacacagctggtggtcaagcccaacacgcgtatccagaaccctgatcctgccgtgtaccagctgcgggatagcaagagcagcgacaagagcgtgtgtctgttcaccgacttcgacagccagaccaacgtgtcccagagcaaggactccgacgtgtacatcaccgataagaccgtgctggacatgcggagcatggacttcaagagcaactccgccgtggcctggtccaacaagtccgatttcgcctgcgccaacgccttcaacaacagcattatccccgaggacacattcttcccaagccccgagagcagctgcggtacccagagttttgggttgttggaccctaaattgtgctatctgttggacggaatcctgttcatttacggagtgatcctgaccgcattgttcctgcgggttaagttttccagatccgcagacgcacccgcttaccaacaagggcagaaccaactctacaatgaacttaatttggggcggagggaagagtacgacgttctggacaaaaggaggggacgagatcccgagatgggcggaaagcctcagcgaaggaagaatccgcaagaggggctttataacgaactccagaaagataaaatggcagaagcctatagtgagattgggatgaagggagaaaggaggaggggtaaaggtcacgatgggttgtaccaaggattgagcacagccactaaagatacctatgatgcgctccacatgcaggccctgccgccaaga

SEQ ID NO: 9535 - DNA, 3087 bp, Artificial Sequence
  Synthetic Polynucleotide
atggccttaccagtgaccgccttgctcctgccgctggccttgctgctccacgccgccaggccggaagccgacatctaccagacacctagatacctggtcatcggcaccggcaagaaaatcaccctggaatgcagccagacaatgggccacgacaagatgtactggtatcagcaggaccccggcatggaactgcacctgatccactacagctacggcgtgaacagcaccgagaagggcgatctgtctagcgagagcaccgtgtccagaatcagaaccgagcacttcccactgacactggaaagcgccagacctagccacaccagccagtacctgtgtgcctcttctgaggccagaggactggccgagttcaccgacacacagtatttcggccctggcaccagactgaccgttctcgaggacaagcagctggacgccgacgtgtcccccaagcctaccatcttcctgccctctatcgccgagacaaagctccagaaggccggcacctacctgtgcctgctggaaaagttcttcccagatgtgattaagatccactggcaggaaaagaagtccaacaccatcctgggcagccaggaaggcaacaccatgaagaccaacgacacctacatgaagttcagctggctgaccgtgcccgagaagtccctggacaaagaacacagatgcatcgtgcggcacgaaaacaacaagaacggcgtggaccaggaaatcatcttcccacccatcaagaccgatgtgattacaggatcccagagcttcggcctgctggaccccaagctgtgctacctgctggatggcatcctgttcatctacggcgtgatcctgaccgccctgttcctgagagtgaagttcagcagaagcgccgacgcccctgcctaccagcagggacagaaccaactgtacaacgagctgaacctgggcagacgggaagagtacgacgtgctggacaagcggagaggcagggaccctgagatgggcggaaagccccagcggagaaagaacccccaggaaggactgtataacgaactccagaaagacaagatggccgaagcctacagcgagatcggcatgaagggcgagcggagaagaggcaagggccacgatggcctgtaccagggcctgagcaccgccaccaaggacacctatgacgccctgcacatgcaggccctgcctccaagaagggccaagcgatctggatctggagcaacaaacttctcactactcaaacaagcaggtgacgtggaggagaatcccgggcctactagtatggactggatttggcgcatccttttccttgtcggcgctgctaccggcgcgcattccttcgaagcccagaccgtgacacagagccagcctgagatgtctgtgcaagaggccgagacagtgaccctgagctgcacctacgataccagcgagagcgactactacctgttctggtacaagcagcctcctagccggcagatgatcctggtcatccggcaagaagcctataagcagcagaacgccaccgagaacagattcagcgtgaacttccagaaggccgccaagagcttcagcctgaagatcagcgatagccagctgggcgacgccgccatgtacttttgcgcttatagaagcgccgtgaacgcccggctgatgtttggagatggcacacagctggtggtcaagcccaacacgcgtagccagcctcacaccaagcccagcgtgttcgtgatgaagaacggcaccaacgtggcctgcctcgtgaaagagttctaccccaaggacatcaggatcaacctggtgtccagcaagaagatcaccgagttcgaccccgccatcgtgatctcccccagcggcaagtacaacgccgtgaagctggggaagtacgaggacagcaacagcgtgacctgctccgtgcagcacgacaacaagaccgtgcacagcaccgactttggtacccagagttttgggttgttggaccctaaattgtgctatctgttggacggaatcctgttcatttacggagtgatcctgaccgcattgttcctgcgggttaagttttccagatccgcagacgcacccgcttaccaacaagggcagaaccaactctacaatgaacttaatttggggcggagggaagagtacgacgttctggacaaaaggaggggacgagatcccgagatgggcggaaagcctcagcgaaggaagaatccgcaagaggggctttataacgaactccagaaagataaaatggcagaagcctatagtgagattgggatgaagggagaaaggaggaggggtaaaggtcacgatgggttgtaccaaggattgagcacagccactaaagatacctatgatgcgctccacatgcaggccctgccgccaagacgcgccaagagaagcggatctggcgtgaagcagaccctgaatttcgacctgctgaagctggctggcgacgtggaatccaacccaggcccttctagaggccatatgaccgagtacaagcccacggtgcgcctcgccacccgcgacgacgtccccagggccgtacgcaccctcgccgccgcgttcgccgactaccccgccacgcgccacaccgtcgatccggaccgccacatcgagcgggtcaccgagctgcaagaactcttcctcacgcgcgtcgggctcgacatcggcaaggtgtgggtcgcggacgacggcgccgcggtggcggtctggaccacgccggagagcgtcgaagcgggggcggtgttcgccgagatcggcccgcgcatggccgagttgagcggttcccggctggccgcgcagcaacagatggaaggcctcctggcgccgcaccggcccaaggagcccgcgtggttcctggccaccgtcggcgtctcgcccgaccaccagggcaagggtctgggcagcgccgtcgtgctccccggagtggaggcggccgagcgcgccggggtgcccgccttcctggagacctccgcgccccgcaacctccccttctacgagcggctcggcttcaccgtcaccgccgacgtcgaggtgcccgaaggaccgcgcacctggtgcatgacccgcaagcccggtgcctga

SEQ ID NO: 9536 - DNA, 2697 bp, Artificial Sequence
  Synthetic Polynucleotide
atggccttaccagtgaccgccttgctcctgccgctggccttgctgctccacgccgccaggccggaagccgacatctaccagacacctagatacctggtcatcggcaccggcaagaaaatcaccctggaatgcagccagacaatgggccacgacaagatgtactggtatcagcaggaccccggcatggaactgcacctgatccactacagctacggcgtgaacagcaccgagaagggcgatctgtctagcgagagcaccgtgtccagaatcagaaccgagcacttcccactgacactggaaagcgccagacctagccacaccagccagtacctgtgtgcctcttctgaggccagaggactggccgagttcaccgacacacagtatttcggccctggcaccagactgaccgttctcgagggacagcctaaggccaatcctaccgtgacactgttccctccaagcagcgaagaactccaggccaacaaggccacacttgtgtgcctgatctccgacttctaccctggggctgtgacagtggcttggaaggccgatggatctcctgtgaaagccggcgtggaaaccaccaagccatccaagcagagcaacaacaaatacgccgccagctcctacctgagcctgacacctgagcagtggaagtcccacagatcctacagctgccaagtgacccacgaaggcagcaccgtggaaaagacagtggcccctacagagtgcagcacaacacctggcgagagaagtagcctgcctgccttctatcctggcaccagcggctcttgttctggctgtggatctctgagcctgcctctgctggctggactggttgctgctgatgctgtggcctctctgctgattgtgggagccgtgttcctgtgcgccagacctagaagaagccccgctcaagaggacggcaaggtgtacatcaacatgcccggcagaggaagggccaagcgatctggatctggagcaacaaacttctcactactcaaacaagcaggtgacgtggaggagaatcccgggcctactagtatggactggatttggcgcatccttttccttgtcggcgctgctaccggcgcgcattccttcgaagcccagaccgtgacacagagccagcctgagatgtctgtgcaagaggccgagacagtgaccctgagctgcacctacgataccagcgagagcgactactacctgttctggtacaagcagcctcctagccggcagatgatcctggtcatccggcaagaagcctataagcagcagaacgccaccgagaacagattcagcgtgaacttccagaaggccgccaagagcttcagcctgaagatcagcgatagccagctgggcgacgccgccatgtacttttgcgcttatagaagcgccgtgaacgcccggctgatgtttggagatggcacacagctggtggtcaagcccaacacgcgtgcctctacaaagggaccctccgtgtttcctctggctcccagcagcaagtctacaagcggaggaacagccgctctgggctgcctggtcaaggattactttcccgagcctgtgaccgtgtcctggaatagcggagcactgacaagcggcgtgcacacctttccagccgtgctgcaaagcagcggcctgtactctctgagcagcgtggtcacagtgcctagctctagcctgggcacccagacctacatctgcaatgtgaaccacaagcctagcaacaccaaggtggacaagagagtggaacccaagagctgtacaacgccgggcgaaaggagttccttgccggccttttaccccggcacaagcggaagctgtagtgggtgtggaagcctcagcctcccacttcttgcgggcctcgtcgcggcagatgcagtagcttcacttcttattgtaggcgcggtatttctctgtgctcgaccaaggaggtcacccgctcaggaggatggtaaggtgtatataaatatgccaggacgcggacgcgccaagagaagcggatctggcgtgaagcagaccctgaatttcgacctgctgaagctggctggcgacgtggaatccaacccaggcccttctagaggccatatgaccgagtacaagcccacggtgcgcctcgccacccgcgacgacgtccccagggccgtacgcaccctcgccgccgcgttcgccgactaccccgccacgcgccacaccgtcgatccggaccgccacatcgagcgggtcaccgagctgcaagaactcttcctcacgcgcgtcgggctcgacatcggcaaggtgtgggtcgcggacgacggcgccgcggtggcggtctggaccacgccggagagcgtcgaagcgggggcggtgttcgccgagatcggcccgcgcatggccgagttgagcggttcccggctggccgcgcagcaacagatggaaggcctcctggcgccgcaccggcccaaggagcccgcgtggttcctggccaccgtcggcgtctcgcccgaccaccagggcaagggtctgggcagcgccgtcgtgctccccggagtggaggcggccgagcgcgccggggtgcccgccttcctggagacctccgcgccccgcaacctccccttctacgagcggctcggcttcaccgtcaccgccgacgtcgaggtgcccgaaggaccgcgcacctggtgcatgacccgcaagcccggtgcctgagtcgac

SEQ ID NO: 9537 - DNA, 2178 bp, Artificial Sequence
  Synthetic Polynucleotide
atggccttaccagtgaccgccttgctcctgccgctggccttgctgctccacgccgccaggccggaagccgacatctaccagacacctagatacctggtcatcggcaccggcaagaaaatcaccctggaatgcagccagacaatgggccacgacaagatgtactggtatcagcaggaccccggcatggaactgcacctgatccactacagctacggcgtgaacagcaccgagaagggcgatctgtctagcgagagcaccgtgtccagaatcagaaccgagcacttcccactgacactggaaagcgccagacctagccacaccagccagtacctgtgtgcctcttctgaggccagaggactggccgagttcaccgacacacagtatttcggccctggcaccagactgaccgttctcgagggcgacatcgagaacaccagtctggcccctgaggaccctacctttcctgccgatacctggggcacctacctgctgaccacagagacaggactccagaaagatcacgccctgtgggaccacacagcccagaacctgctgagaatgggcctcgcctttctggtgctggttgccctcgtgtggttcctggtggaagattggctgagccggaagcggacaagagagagagccagcagagcctctacctgggagggaagaagaaggctgaacacccagacacttagggccaagcgatctggatctggagcaacaaacttctcactactcaaacaagcaggtgacgtggaggagaatcccgggcctactagtatggactggatttggcgcatccttttccttgtcggcgctgctaccggcgcgcattccttcgaagcccagaccgtgacacagagccagcctgagatgtctgtgcaagaggccgagacagtgaccctgagctgcacctacgataccagcgagagcgactactacctgttctggtacaagcagcctcctagccggcagatgatcctggtcatccggcaagaagcctataagcagcagaacgccaccgagaacagattcagcgtgaacttccagaaggccgccaagagcttcagcctgaagatcagcgatagccagctgggcgacgccgccatgtacttttgcgcttatagaagcgccgtgaacgcccggctgatgtttggagatggcacacagctggtggtcaagcccaacacgcgtggcgatattgagaatacctctctggccccagaagatcctacattccccgccgacacatggggaacatatctgctgacaaccgaaaccgggctgcaaaaggaccatgctctgtgggatcataccgctcagaatctgcttcggatggggcttgcattcctggtcctggtggctcttgtctggtttctggtcgaggactggctgtcccggaagagaaccagagaaagagcttccagggccagcacctgggaaggcagacgcagactgaatactcagaccctgcgcgccaagagaagcggatctggcgtgaagcagaccctgaatttcgacctgctgaagctggctggcgacgtggaatccaacccaggcccttctagaggccatatgaccgagtacaagcccacggtgcgcctcgccacccgcgacgacgtccccagggccgtacgcaccctcgccgccgcgttcgccgactaccccgccacgcgccacaccgtcgatccggaccgccacatcgagcgggtcaccgagctgcaagaactcttcctcacgcgcgtcgggctcgacatcggcaaggtgtgggtcgcggacgacggcgccgcggtggcggtctggaccacgccggagagcgtcgaagcgggggcggtgttcgccgagatcggcccgcgcatggccgagttgagcggttcccggctggccgcgcagcaacagatggaaggcctcctggcgccgcaccggcccaaggagcccgcgtggttcctggccaccgtcggcgtctcgcccgaccaccagggcaagggtctgggcagcgccgtcgtgctccccggagtggaggcggccgagcgcgccggggtgcccgccttcctggagacctccgcgccccgcaacctccccttctacgagcggctcggcttcaccgtcaccgccgacgtcgaggtgcccgaaggaccgcgcacctggtgcatgacccgcaagcccggtgcctga

SEQ ID NO: 9538 - DNA, 2010 bp, Artificial Sequence
  Synthetic Polynucleotide
atggccttaccagtgaccgccttgctcctgccgctggccttgctgctccacgccgccaggccggaagccgacatctaccagacacctagatacctggtcatcggcaccggcaagaaaatcaccctggaatgcagccagacaatgggccacgacaagatgtactggtatcagcaggaccccggcatggaactgcacctgatccactacagctacggcgtgaacagcaccgagaagggcgatctgtctagcgagagcaccgtgtccagaatcagaaccgagcacttcccactgacactggaaagcgccagacctagccacaccagccagtacctgtgtgcctcttctgaggccagaggactggccgagttcaccgacacacagtatttcggccctggcaccagactgaccgttctcgagatcactcaaggtttggcagtgtcaaccatctcatcattctttccacctggctaccaagtgtccttctgcctggtcatggtgctgctgttcgccgtggataccggcctgtacttcagcgtcaagaccaacatccggtccagcaccagagactggaaggaccacaagttcaagtggcggaaggaccctcaggacaagagggccaagcgatctggatctggagcaacaaacttctcactactcaaacaagcaggtgacgtggaggagaatcccgggcctactagtatggactggatttggcgcatccttttccttgtcggcgctgctaccggcgcgcattccttcgaagcccagaccgtgacacagagccagcctgagatgtctgtgcaagaggccgagacagtgaccctgagctgcacctacgataccagcgagagcgactactacctgttctggtacaagcagcctcctagccggcagatgatcctggtcatccggcaagaagcctataagcagcagaacgccaccgagaacagattcagcgtgaacttccagaaggccgccaagagcttcagcctgaagatcagcgatagccagctgggcgacgccgccatgtacttttgcgcttatagaagcgccgtgaacgcccggctgatgtttggagatggcacacagctggtggtcaagcccaacacgcgtatcacccagggcctggccgtgtctaccatcagcagctttttcccacccggctaccaggtgtccttctgcctcgtgatggtgctgctgttcgccgtggacaccggcctgtacttcagcgtgaaaacaaacatccggtccagcaccagagactggaaggaccacaagttcaagtggcggaaggacccccaggacaagcgcgccaagagaagcggatctggcgtgaagcagaccctgaatttcgacctgctgaagctggctggcgacgtggaatccaacccaggcccttctagaggccatatgaccgagtacaagcccacggtgcgcctcgccacccgcgacgacgtccccagggccgtacgcaccctcgccgccgcgttcgccgactaccccgccacgcgccacaccgtcgatccggaccgccacatcgagcgggtcaccgagctgcaagaactcttcctcacgcgcgtcgggctcgacatcggcaaggtgtgggtcgcggacgacggcgccgcggtggcggtctggaccacgccggagagcgtcgaagcgggggcggtgttcgccgagatcggcccgcgcatggccgagttgagcggttcccggctggccgcgcagcaacagatggaaggcctcctggcgccgcaccggcccaaggagcccgcgtggttcctggccaccgtcggcgtctcgcccgaccaccagggcaagggtctgggcagcgccgtcgtgctccccggagtggaggcggccgagcgcgccggggtgcccgccttcctggagacctccgcgccccgcaacctccccttctacgagcggctcggcttcaccgtcaccgccgacgtcgaggtgcccgaaggaccgcgcacctggtgcatgacccgcaagcccggtgcctga

SEQ ID NO: 9539 - DNA, 2718 bp, Artificial Sequence
  Synthetic Polynucleotide
atggccttaccagtgaccgccttgctcctgccgctggccttgctgctccacgccgccaggccggaagccgacatctaccagacacctagatacctggtcatcggcaccggcaagaaaatcaccctggaatgcagccagacaatgggccacgacaagatgtactggtatcagcaggaccccggcatggaactgcacctgatccactacagctacggcgtgaacagcaccgagaagggcgatctgtctagcgagagcaccgtgtccagaatcagaaccgagcacttcccactgacactggaaagcgccagacctagccacaccagccagtacctgtgtgcctcttctgaggccagaggactggccgagttcaccgacacacagtatttcggccctggcaccagactgaccgttctcgagctgtgggtttcacagcctccagagatcagaaccctggaaggcagcagcgccttcctgccttgcagcttcaatgcctctcagggcagactggctatcggcagcgtgacctggttcagagatgaggtggtgcccggcaaagaagtgcggaacggcacccctgagtttagaggaaggctggcccctctggcctccagcagatttctgcacgatcaccaggccgagctgcacatcagagatgtgcgaggacacgacgccagcatctacgtgtgcagagtggaagtgctcggcctcggagttggcacaggcaatggaacaagactggtggtggaaaaagagcaccctcagctcggagccggaacagtgctgcttctgagagccggcttttacgccgtgtcctttctgtctgtggccgtgggcagcaccgtgtactatcagggcaagtgcctgacctggaagggacctagaaggcaactgcctgctgtggtgcctgctcctttgcctcctccatgtggaagctctgcccatctgctgccacctgttccaggcggaagggccaagcgatctggatctggagcaacaaacttctcactactcaaacaagcaggtgacgtggaggagaatcccgggcctactagtatggactggatttggcgcatccttttccttgtcggcgctgctaccggcgcgcattccttcgaagcccagaccgtgacacagagccagcctgagatgtctgtgcaagaggccgagacagtgaccctgagctgcacctacgataccagcgagagcgactactacctgttctggtacaagcagcctcctagccggcagatgatcctggtcatccggcaagaagcctataagcagcagaacgccaccgagaacagattcagcgtgaacttccagaaggccgccaagagcttcagcctgaagatcagcgatagccagctgggcgacgccgccatgtacttttgcgcttatagaagcgccgtgaacgcccggctgatgtttggagatggcacacagctggtggtcaagcccaacacgcgtctgtgggtgtcccagccacctgaaattcggacactggaaggctcctccgcctttctgccctgtagctttaacgccagccaggggagactcgccatcggctctgtgacatggttccgggatgaagtcgtccctggaaaagaagttcgcaacggaacaccagagttcagaggcagactcgccccactggcaagctccagattcctgcatgaccatcaggctgaactgcacattagggacgtgcggggccacgatgcctccatctatgtgtgtcgggtcgaagtgcttggactcggcgtcggaactggaaacggcactaggctggtggtcgagaaagaacatccacagcttggcgctggcaccgtcctgttgcttagagccggattctatgccgtcagcttcctgtccgtggctgtggggtctacagtgtattaccagggaaaatgtctcacctggaaaggccccagacgccagcttccagctgttgttcctgctccactgccaccaccttgtggctcctctgctcacttgcttccaccagtgcctggcggacgcgccaagagaagcggatctggcgtgaagcagaccctgaatttcgacctgctgaagctggctggcgacgtggaatccaacccaggcccttctagaggccatatgaccgagtacaagcccacggtgcgcctcgccacccgcgacgacgtccccagggccgtacgcaccctcgccgccgcgttcgccgactaccccgccacgcgccacaccgtcgatccggaccgccacatcgagcgggtcaccgagctgcaagaactcttcctcacgcgcgtcgggctcgacatcggcaaggtgtgggtcgcggacgacggcgccgcggtggcggtctggaccacgccggagagcgtcgaagcgggggcggtgttcgccgagatcggcccgcgcatggccgagttgagcggttcccggctggccgcgcagcaacagatggaaggcctcctggcgccgcaccggcccaaggagcccgcgtggttcctggccaccgtcggcgtctcgcccgaccaccagggcaagggtctgggcagcgccgtcgtgctccccggagtggaggcggccgagcgcgccggggtgcccgccttcctggagacctccgcgccccgcaacctccccttctacgagcggctcggcttcaccgtcaccgccgacgtcgaggtgcccgaaggaccgcgcacctggtgcatgacccgcaagcccggtgcctga

SEQ ID NO: 9540 - DNA, 2718 bp, Artificial Sequence; identical to SEQ ID NO: 9539
  Synthetic Polynucleotide

SEQ ID NO: 9541 - DNA, 2403 bp, Artificial Sequence
  Synthetic Polynucleotide
atggccttaccagtgaccgccttgctcctgccgctggccttgctgctccacgccgccaggccggaagccgacatctaccagacacctagatacctggtcatcggcaccggcaagaaaatcaccctggaatgcagccagacaatgggccacgacaagatgtactggtatcagcaggaccccggcatggaactgcacctgatccactacagctacggcgtgaacagcaccgagaagggcgatctgtctagcgagagcaccgtgtccagaatcagaaccgagcacttcccactgacactggaaagcgccagacctagccacaccagccagtacctgtgtgcctcttctgaggccagaggactggccgagttcaccgacacacagtatttcggccctggcaccagactgaccgttggacagcctaaggccaatcctaccgtgacactgttccctccaagcagcgaagaactccaggccaacaaggccacacttgtgtgcctgatctccgacttctaccctggggctgtgacagtggcttggaaggccgatggatctcctgtgaaagccggcgtggaaaccaccaagccatccaagcagagcaacaacaaatacgccgccagctcctacctgagcctgacacctgagcagtggaagtcccacagatcctacagctgccaagtgacccacgaaggcagcaccgtggaaaagacagtggcccctacagagtgcagcggatcccagagcttcggcctgctggaccccaagctgtgctacctgctggatggcatcctgttcatctacggcgtgatcctgaccgccctgttcctgagagtgaagttcagcagaagcgccgacgcccctgcctaccagcagggacagaaccaactgtacaacgagctgaacctgggcagacgggaagagtacgacgtgctggacaagcggagaggcagggaccctgagatgggcggaaagccccagcggagaaagaacccccaggaaggactgtataacgaactccagaaagacaagatggccgaagcctacagcgagatcggcatgaagggcgagcggagaagaggcaagggccacgatggcctgtaccagggcctgagcaccgccaccaaggacacctatgacgccctgcacatgcaggccctgcctccaagaagggccaagcgatctggatctggagcaacaaacttctcactactcaaacaagcaggtgacgtggaggagaatcccgggcctactagtatggactggatttggcgcatccttttccttgtcggcgctgctaccggcgcgcattccttcgaagcccagaccgtgacacagagccagcctgagatgtctgtgcaagaggccgagacagtgaccctgagctgcacctacgataccagcgagagcgactactacctgttctggtacaagcagcctcctagccggcagatgatcctggtcatccggcaagaagcctataagcagcagaacgccaccgagaacagattcagcgtgaacttccagaaggccgccaagagcttcagcctgaagatcagcgatagccagctgggcgacgccgccatgtacttttgcgcttatagaagcgccgtgaacgcccggctgatgtttggagatggcacacagctggtggtcaagcccaacgcctctacaaagggaccctccgtgtttcctctggctcccagcagcaagtctacaagcggaggaacagccgctctgggctgcctggtcaaggattactttcccgagcctgtgaccgtgtcctggaatagcggagcactgacaagcggcgtgcacacctttccagccgtgctgcaaagcagcggcctgtactctctgagcagcgtggtcacagtgcctagctctagcctgggcacccagacctacatctgcaatgtgaaccacaagcctagcaacaccaaggtggacaagagagtggaacccaagagctgtggtacccagagttttgggttgttggaccctaaattgtgctatctgttggacggaatcctgttcatttacggagtgatcctgaccgcattgttcctgcgggttaagttttccagatccgcagacgcacccgcttaccaacaagggcagaaccaactctacaatgaacttaatttggggcggagggaagagtacgacgttctggacaaaaggaggggacgagatcccgagatgggcggaaagcctcagcgaaggaagaatccgcaagaggggctttataacgaactccagaaagataaaatggcagaagcctatagtgagattgggatgaagggagaaaggaggaggggtaaaggtcacgatgggttgtaccaaggattgagcacagccactaaagatacctatgatgcgctccacatgcaggccctgccgccaaga

SEQ ID NO: 9542 - DNA, 1701 bp, Artificial Sequence
  Synthetic Polynucleotide
atggccttaccagtgaccgccttgctcctgccgctggccttgctgctccacgccgccaggccggaagccgacatctaccagacacctagatacctggtcatcggcaccggcaagaaaatcaccctggaatgcagccagacaatgggccacgacaagatgtactggtatcagcaggaccccggcatggaactgcacctgatccactacagctacggcgtgaacagcaccgagaagggcgatctgtctagcgagagcaccgtgtccagaatcagaaccgagcacttcccactgacactggaaagcgccagacctagccacaccagccagtacctgtgtgcctcttctgaggccagaggactggccgagttcaccgacacacagtatttcggccctggcaccagactgaccgttctcgagcagagcttcggcctgctggaccccaagctgtgctacctgctggatggcatcctgttcatctacggcgtgatcctgaccgccctgttcctgagagtgaagttcagcagaagcgccgacgcccctgcctaccagcagggacagaaccaactgtacaacgagctgaacctgggcagacgggaagagtacgacgtgctggacaagcggagaggcagggaccctgagatgggcggaaagccccagcggagaaagaacccccaggaaggactgtataacgaactccagaaagacaagatggccgaagcctacagcgagatcggcatgaagggcgagcggagaagaggcaagggccacgatggcctgtaccagggcctgagcaccgccaccaaggacacctatgacgccctgcacatgcaggccctgcctccaagaagggccaagcgatctggatctggagcaacaaacttctcactactcaaacaagcaggtgacgtggaggagaatcccgggcctactagtatggactggatttggcgcatccttttccttgtcggcgctgctaccggcgcgcattccttcgaagcccagaccgtgacacagagccagcctgagatgtctgtgcaagaggccgagacagtgaccctgagctgcacctacgataccagcgagagcgactactacctgttctggtacaagcagcctcctagccggcagatgatcctggtcatccggcaagaagcctataagcagcagaacgccaccgagaacagattcagcgtgaacttccagaaggccgccaagagcttcagcctgaagatcagcgatagccagctgggcgacgccgccatgtacttttgcgcttatagaagcgccgtgaacgcccggctgatgtttggagatggcacacagctggtggtcaagcccaacacgcgtcagagttttgggttgttggaccctaaattgtgctatctgttggacggaatcctgttcatttacggagtgatcctgaccgcattgttcctgcgggttaagttttccagatccgcagacgcacccgcttaccaacaagggcagaaccaactctacaatgaacttaatttggggcggagggaagagtacgacgttctggacaaaaggaggggacgagatcccgagatgggcggaaagcctcagcgaaggaagaatccgcaagaggggctttataacgaactccagaaagataaaatggcagaagcctatagtgagattgggatgaagggagaaaggaggaggggtaaaggtcacgat

SEQ ID NO: 9543 - DNA, 2748 bp, Artificial Sequence
  Synthetic Polynucleotide
atggccttaccagtgaccgccttgctcctgccgctggccttgctgctccacgccgccaggccggaagccgacatctaccagacacctagatacctggtcatcggcaccggcaagaaaatcaccctggaatgcagccagacaatgggccacgacaagatgtactggtatcagcaggaccccggcatggaactgcacctgatccactacagctacggcgtgaacagcaccgagaagggcgatctgtctagcgagagcaccgtgtccagaatcagaaccgagcacttcccactgacactggaaagcgccagacctagccacaccagccagtacctgtgtgcctcttctgaggccagaggactggccgagttcaccgacacacagtatttcggccctggcaccagactgaccgttctcgagacaacacctggcgagagaagtagcctgcctgccttctatcctggcaccagcggctcttgttctggctgtggatctctgagcctgcctctgctggctggactggttgctgctgatgctgtggcctctctgctgattgtgggagccgtgttcctgtgcgccagacctagaagaagccccgctcaagaggacggcaaggtgtacatcaacatgcccggcagaggaagcactagtagagtgaagttcagcagaagcgccgacgcccctgcctaccagcagggacagaaccaactgtacaacgagctgaacctgggcagacgggaagagtacgacgtgctggacaagcggagaggcagggaccctgagatgggcggaaagccccagcggagaaagaacccccaggaaggactgtataacgaactccagaaagacaagatggccgaagcctacagcgagatcggcatgaagggcgagcggagaagaggcaagggccacgatggcctgtaccagggcctgagcaccgccaccaaggacacctatgacgccctgcacatgcaggccctgcctccaagaagggccaagcgatctggatctggagcaacaaacttctcactactcaaacaagcaggtgacgtggaggagaatcccgggcctatggactggatttggcgcatccttttccttgtcggcgctgctaccggcgcgcattccttcgaagcccagaccgtgacacagagccagcctgagatgtctgtgcaagaggccgagacagtgaccctgagctgcacctacgataccagcgagagcgactactacctgttctggtacaagcagcctcctagccggcagatgatcctggtcatccggcaagaagcctataagcagcagaacgccaccgagaacagattcagcgtgaacttccagaaggccgccaagagcttcagcctgaagatcagcgatagccagctgggcgacgccgccatgtacttttgcgcttatagaagcgccgtgaacgcccggctgatgtttggagatggcacacagctggtggtcaagcccaacacgcgtacaacgccgggcgaaaggagttccttgccggccttttaccccggcacaagcggaagctgtagtgggtgtggaagcctcagcctcccacttcttgcgggcctcgtcgcggcagatgcagtagcttcacttcttattgtaggcgcggtatttctctgtgctcgaccaaggaggtcacccgctcaggaggatggtaaggtgtatataaatatgccaggacgcggaagctctagacgggttaagttttccagatccgcagacgcacccgcttaccaacaagggcagaaccaactctacaatgaacttaatttggggcggagggaagagtacgacgttctggacaaaaggaggggacgagatcccgagatgggcggaaagcctcagcgaaggaagaatccgcaagaggggctttataacgaactccagaaagataaaatggcagaagcctatagtgagattgggatgaagggagaaaggaggaggggtaaaggtcacgatgggttgtaccaaggattgagcacagccactaaagatacctatgatgcgctccacatgcaggccctgccgccaagacgcgccaagagaagcggatctggcgtgaagcagaccctgaatttcgacctgctgaagctggctggcgacgtggaatccaacccaggccctggccatatgaccgagtacaagcccacggtgcgcctcgccacccgcgacgacgtccccagggccgtacgcaccctcgccgccgcgttcgccgactaccccgccacgcgccacaccgtcgatccggaccgccacatcgagcgggtcaccgagctgcaagaactcttcctcacgcgcgtcgggctcgacatcggcaaggtgtgggtcgcggacgacggcgccgcggtggcggtctggaccacgccggagagcgtcgaagcgggggcggtgttcgccgagatcggcccgcgcatggccgagttgagcggttcccggctggccgcgcagcaacagatggaaggcctcctggcgccgcaccggcccaaggagcccgcgtggttcctggccaccgtcggcgtctcgcccgaccaccagggcaagggtctgggcagcgccgtcgtgctccccggagtggaggcggccgagcgcgccggggtgcccgccttcctggagacctccgcgccccgcaacctccccttctacgagcggctcggcttcaccgtcaccgccgacgtcgaggtgcccgaaggaccgcgcacctggtgcatgacccgcaagcccggtgcctga

SEQ ID NO: 9544 - DNA, 2748 bp, Artificial Sequence; identical to SEQ ID NO: 9543
  Synthetic Polynucleotide

SEQ ID NO: 9545 - DNA, 3351 bp, Artificial Sequence
  Synthetic Polynucleotide
atggccttaccagtgaccgccttgctcctgccgctggccttgctgctccacgccgccaggccggaagccgacatctaccagacacctagatacctggtcatcggcaccggcaagaaaatcaccctggaatgcagccagacaatgggccacgacaagatgtactggtatcagcaggaccccggcatggaactgcacctgatccactacagctacggcgtgaacagcaccgagaagggcgatctgtctagcgagagcaccgtgtccagaatcagaaccgagcacttcccactgacactggaaagcgccagacctagccacaccagccagtacctgtgtgcctcttctgaggccagaggactggccgagttcaccgacacacagtatttcggccctggcaccagactgaccgttctcgagggacagcctaaggccaatcctaccgtgacactgttccctccaagcagcgaagaactccaggccaacaaggccacacttgtgtgcctgatctccgacttctaccctggggctgtgacagtggcttggaaggccgatggatctcctgtgaaagccggcgtggaaaccaccaagccatccaagcagagcaacaacaaatacgccgccagctcctacctgagcctgacacctgagcagtggaagtcccacagatcctacagctgccaagtgacccacgaaggcagcaccgtggaaaagacagtggcccctacagagtgcagcggatccacaacacctggcgagagaagtagcctgcctgccttctatcctggcaccagcggctcttgttctggctgtggatctctgagcctgcctctgctggctggactggttgctgctgatgctgtggcctctctgctgattgtgggagccgtgttcctgtgcgccagacctagaagaagccccgctcaagaggacggcaaggtgtacatcaacatgcccggcagaggaagcactagtagagtgaagttcagcagaagcgccgacgcccctgcctaccagcagggacagaaccaactgtacaacgagctgaacctgggcagacgggaagagtacgacgtgctggacaagcggagaggcagggaccctgagatgggcggaaagccccagcggagaaagaacccccaggaaggactgtataacgaactccagaaagacaagatggccgaagcctacagcgagatcggcatgaagggcgagcggagaagaggcaagggccacgatggcctgtaccagggcctgagcaccgccaccaaggacacctatgacgccctgcacatgcaggccctgcctccaagaagggccaagcgatctggatctggagcaacaaacttctcactactcaaacaagcaggtgacgtggaggagaatcccgggcctatggactggatttggcgcatccttttccttgtcggcgctgctaccggcgcgcattccttcgaagcccagaccgtgacacagagccagcctgagatgtctgtgcaagaggccgagacagtgaccctgagctgcacctacgataccagcgagagcgactactacctgttctggtacaagcagcctcctagccggcagatgatcctggtcatccggcaagaagcctataagcagcagaacgccaccgagaacagattcagcgtgaacttccagaaggccgccaagagcttcagcctgaagatcagcgatagccagctgggcgacgccgccatgtacttttgcgcttatagaagcgccgtgaacgcccggctgatgtttggagatggcacacagctggtggtcaagcccaacacgcgtgcctctacaaagggaccctccgtgtttcctctggctcccagcagcaagtctacaagcggaggaacagccgctctgggctgcctggtcaaggattactttcccgagcctgtgaccgtgtcctggaatagcggagcactgacaagcggcgtgcacacctttccagccgtgctgcaaagcagcggcctgtactctctgagcagcgtggtcacagtgcctagctctagcctgggcacccagacctacatctgcaatgtgaaccacaagcctagcaacaccaaggtggacaagagagtggaacccaagagctgtggtaccacaacgccgggcgaaaggagttccttgccggccttttaccccggcacaagcggaagctgtagtgggtgtggaagcctcagcctcccacttcttgcgggcctcgtcgcggcagatgcagtagcttcacttcttattgtaggcgcggtatttctctgtgctcgaccaaggaggtcacccgctcaggaggatggtaaggtgtatataaatatgccaggacgcggaagctctagacgggttaagttttccagatccgcagacgcacccgcttaccaacaagggcagaaccaactctacaatgaacttaatttggggcggagggaagagtacgacgttctggacaaaaggaggggacgagatcccgagatgggcggaaagcctcagcgaaggaagaatccgcaagaggggctttataacgaactccagaaagataaaatggcagaagcctatagtgagattgggatgaagggagaaaggaggaggggtaaaggtcacgatgggttgtaccaaggattgagcacagccactaaagatacctatgatgcgctccacatgcaggccctgccgccaagacgcgccaagagaagcggatctggcgtgaagcagaccctgaatttcgacctgctgaagctggctggcgacgtggaatccaacccaggccctggccatatggctacctacgaggtgctgtgcgaggtggcaagaaagctgggcaccgacgacagagaagtggtgctgttcctgctgaacgtgttcatccctcagcctacactggcccagctgatcggtgcactgagagccctgaaagaggaaggccggctgacctttcctctgctggccgaatgcctgttcagagccggaagaagggatctgctgcgggacctgctgcatctggaccccagatttctggaaagacacctggccggcaccatgagctacttcagcccttaccagctgaccgtgctgcacgttgacggcgaactgtgcgccagagatattcggagcctgatcttcctgagcaaggacaccatcggcagccggtctacccctcagacatttctgcactgggtgtactgcatggaaaacctggacctgctcggccccacagatgtggatgccctgatgtccatgctgagaagcctgagcagagtggacctccagagacaggtgcagacactgatgggactgcacctgagcggacctagccacagccagcactacagacacacccct

SEQ ID NO: 9546 - DNA, 3510 bp, Artificial Sequence
  Synthetic Polynucleotide
atggccttaccagtgaccgccttgctcctgccgctggccttgctgctccacgccgccaggccggaagccgacatctaccagacacctagatacctggtcatcggcaccggcaagaaaatcaccctggaatgcagccagacaatgggccacgacaagatgtactggtatcagcaggaccccggcatggaactgcacctgatccactacagctacggcgtgaacagcaccgagaagggcgatctgtctagcgagagcaccgtgtccagaatcagaaccgagcacttcccactgacactggaaagcgccagacctagccacaccagccagtacctgtgtgcctcttctgaggccagaggactggccgagttcaccgacacacagtatttcggccctggcaccagactgaccgttctcgagggacagcctaaggccaatcctaccgtgacactgttccctccaagcagcgaagaactccaggccaacaaggccacacttgtgtgcctgatctccgacttctaccctggggctgtgacagtggcttggaaggccgatggatctcctgtgaaagccggcgtggaaaccaccaagccatccaagcagagcaacaacaaatacgccgccagctcctacctgagcctgacacctgagcagtggaagtcccacagatcctacagctgccaagtgacccacgaaggcagcaccgtggaaaagacagtggcccctacagagtgcagcggatccacaacacctggcgagagaagtagcctgcctgccttctatcctggcaccagcggctcttgttctggctgtggatctctgagcctgcctctgctggctggactggttgctgctgatgctgtggcctctctgctgattgtgggagccgtgttcctgtgcgccagacctagaagaagccccgctcaagaggacggcaaggtgtacatcaacatgcccggcagaggaagcactagtagagtgaagttcagcagaagcgccgacgcccctgcctaccagcagggacagaaccaactgtacaacgagctgaacctgggcagacgggaagagtacgacgtgctggacaagcggagaggcagggaccctgagatgggcggaaagccccagcggagaaagaacccccaggaaggactgtataacgaactccagaaagacaagatggccgaagcctacagcgagatcggcatgaagggcgagcggagaagaggcaagggccacgatggcctgtaccagggcctgagcaccgccaccaaggacacctatgacgccctgcacatgcaggccctgcctccaagaagggccaagcgatctggatctggagcaacaaacttctcactactcaaacaagcaggtgacgtggaggagaatcccgggcctatggactggatttggcgcatccttttccttgtcggcgctgctaccggcgcgcattccttcgaagcccagaccgtgacacagagccagcctgagatgtctgtgcaagaggccgagacagtgaccctgagctgcacctacgataccagcgagagcgactactacctgttctggtacaagcagcctcctagccggcagatgatcctggtcatccggcaagaagcctataagcagcagaacgccaccgagaacagattcagcgtgaacttccagaaggccgccaagagcttcagcctgaagatcagcgatagccagctgggcgacgccgccatgtacttttgcgcttatagaagcgccgtgaacgcccggctgatgtttggagatggcacacagctggtggtcaagcccaacacgcgtgcctctacaaagggaccctccgtgtttcctctggctcccagcagcaagtctacaagcggaggaacagccgctctgggctgcctggtcaaggattactttcccgagcctgtgaccgtgtcctggaatagcggagcactgacaagcggcgtgcacacctttccagccgtgctgcaaagcagcggcctgtactctctgagcagcgtggtcacagtgcctagctctagcctgggcacccagacctacatctgcaatgtgaaccacaagcctagcaacaccaaggtggacaagagagtggaacccaagagctgtggtaccacaacgccgggcgaaaggagttccttgccggccttttaccccggcacaagcggaagctgtagtgggtgtggaagcctcagcctcccacttcttgcgggcctcgtcgcggcagatgcagtagcttcacttcttattgtaggcgcggtatttctctgtgctcgaccaaggaggtcacccgctcaggaggatggtaaggtgtatataaatatgccaggacgcggaagctctagacgggttaagttttccagatccgcagacgcacccgcttaccaacaagggcagaaccaactctacaatgaacttaatttggggcggagggaagagtacgacgttctggacaaaaggaggggacgagatcccgagatgggcggaaagcctcagcgaaggaagaatccgcaagaggggctttataacgaactccagaaagataaaatggcagaagcctatagtgagattgggatgaagggagaaaggaggaggggtaaaggtcacgatgggttgtaccaaggattgagcacagccactaaagatacctatgatgcgctccacatgcaggccctgccgccaagacgcgccaagagaagcggatctggcgtgaagcagaccctgaatttcgacctgctgaagctggctggcgacgtggaatccaacccaggccctggccatatgtccgactccaaggaggtccctagccttccatttttgcgacacttgctcgaagagttggacagccatgaggacagcttgctgctgtttctgtgtcacgacgcggccccgggctgcacgacggtcacgcaagctttgtgctcgcttagccaacagcgcaagctgaccctcgcggctctggtcgagatgctctacgtgctgcagcgtatggatcttctcaagagccgcttcgggctcagcaaggagggggccgagcaattgctgggcacaagctttctcacgcgctaccgcaagctcatggtttgcgtgggtgaggagctcgactcgagcgagctacgcgctctacgcttgttcgcgtgcaacctgaatccgagcctgagcacggcgctttctgagagcagccgctttgtcgagcttgtactcgcgcttgaaaacgtaggactcgtctcgccatcgagtgtttccgtgcttgcggacatgttgcgcactcttcggcgcctcgatttgtgccagcagcttgttgagtacgaacaacaagagcaagccaggtaccgttactgttacgcggcctcgccctcattgccagttcgtacgttacgtcgggggcacggcgcgagtgaacacgagcagctgtgcatgcccgtgcaagaatcctctgacagccccgagctgctgcgcacgcccgtacaagaatcctccagcgacagccccgagcaaacgact

SEQ ID NO: 9547 - DNA, 3387 bp, Artificial Sequence
  Synthetic Polynucleotide
atggccttaccagtgaccgccttgctcctgccgctggccttgctgctccacgccgccaggccggaagccgacatctaccagacacctagatacctggtcatcggcaccggcaagaaaatcaccctggaatgcagccagacaatgggccacgacaagatgtactggtatcagcaggaccccggcatggaactgcacctgatccactacagctacggcgtgaacagcaccgagaagggcgatctgtctagcgagagcaccgtgtccagaatcagaaccgagcacttcccactgacactggaaagcgccagacctagccacaccagccagtacctgtgtgcctcttctgaggccagaggactggccgagttcaccgacacacagtatttcggccctggcaccagactgaccgttctcgagggacagcctaaggccaatcctaccgtgacactgttccctccaagcagcgaagaactccaggccaacaaggccacacttgtgtgcctgatctccgacttctaccctggggctgtgacagtggcttggaaggccgatggatctcctgtgaaagccggcgtggaaaccaccaagccatccaagcagagcaacaacaaatacgccgccagctcctacctgagcctgacacctgagcagtggaagtcccacagatcctacagctgccaagtgacccacgaaggcagcaccgtggaaaagacagtggcccctacagagtgcagcggatccacaacacctggcgagagaagtagcctgcctgccttctatcctggcaccagcggctcttgttctggctgtggatctctgagcctgcctctgctggctggactggttgctgctgatgctgtggcctctctgctgattgtgggagccgtgttcctgtgcgccagacctagaagaagccccgctcaagaggacggcaaggtgtacatcaacatgcccggcagaggaagcactagtagagtgaagttcagcagaagcgccgacgcccctgcctaccagcagggacagaaccaactgtacaacgagctgaacctgggcagacgggaagagtacgacgtgctggacaagcggagaggcagggaccctgagatgggcggaaagccccagcggagaaagaacccccaggaaggactgtataacgaactccagaaagacaagatggccgaagcctacagcgagatcggcatgaagggcgagcggagaagaggcaagggccacgatggcctgtaccagggcctgagcaccgccaccaaggacacctatgacgccctgcacatgcaggccctgcctccaagaagggccaagcgatctggatctggagcaacaaacttctcactactcaaacaagcaggtgacgtggaggagaatcccgggcctatggactggatttggcgcatccttttccttgtcggcgctgctaccggcgcgcattccttcgaagcccagaccgtgacacagagccagcctgagatgtctgtgcaagaggccgagacagtgaccctgagctgcacctacgataccagcgagagcgactactacctgttctggtacaagcagcctcctagccggcagatgatcctggtcatccggcaagaagcctataagcagcagaacgccaccgagaacagattcagcgtgaacttccagaaggccgccaagagcttcagcctgaagatcagcgatagccagctgggcgacgccgccatgtacttttgcgcttatagaagcgccgtgaacgcccggctgatgtttggagatggcacacagctggtggtcaagcccaacacgcgtgcctctacaaagggaccctccgtgtttcctctggctcccagcagcaagtctacaagcggaggaacagccgctctgggctgcctggtcaaggattactttcccgagcctgtgaccgtgtcctggaatagcggagcactgacaagcggcgtgcacacctttccagccgtgctgcaaagcagcggcctgtactctctgagcagcgtggtcacagtgcctagctctagcctgggcacccagacctacatctgcaatgtgaaccacaagcctagcaacaccaaggtggacaagagagtggaacccaagagctgtggtaccacaacgccgggcgaaaggagttccttgccggccttttaccccggcacaagcggaagctgtagtgggtgtggaagcctcagcctcccacttcttgcgggcctcgtcgcggcagatgcagtagcttcacttcttattgtaggcgcggtatttctctgtgctcgaccaaggaggtcacccgctcaggaggatggtaaggtgtatataaatatgccaggacgcggaagctctagacgggttaagttttccagatccgcagacgcacccgcttaccaacaagggcagaaccaactctacaatgaacttaatttggggcggagggaagagtacgacgttctggacaaaaggaggggacgagatcccgagatgggcggaaagcctcagcgaaggaagaatccgcaagaggggctttataacgaactccagaaagataaaatggcagaagcctatagtgagattgggatgaagggagaaaggaggaggggtaaaggtcacgatgggttgtaccaaggattgagcacagccactaaagatacctatgatgcgctccacatgcaggccctgccgccaagacgcgccaagagaagcggatctggcgtgaagcagaccctgaatttcgacctgctgaagctggctggcgacgtggaatccaacccaggccctggccatatgaccgagtacaagcccacggtgcgcctcgccacccgcgacgacgtccccagggccgtacgcaccctcgccgccgcgttcgccgactaccccgccacgcgccacaccgtcgatccggaccgccacatcgagcgggtcaccgagctgcaagaactcttcctcacgcgcgtcgggctcgacatcggcaaggtgtgggtcgcggacgacggcgccgcggtggcggtctggaccacgccggagagcgtcgaagcgggggcggtgttcgccgagatcggcccgcgcatggccgagttgagcggttcccggctggccgcgcagcaacagatggaaggcctcctggcgccgcaccggcccaaggagcccgcgtggttcctggccaccgtcggcgtctcgcccgaccaccagggcaagggtctgggcagcgccgtcgtgctccccggagtggaggcggccgagcgcgccggggtgcccgccttcctggagacctccgcgccccgcaacctccccttctacgagcggctcggcttcaccgtcaccgccgacgtcgaggtgcccgaaggaccgcgcacctggtgcatgacccgcaagcccggtgcctga

SEQ ID NO: 9548 - DNA, 3798 bp, Artificial Sequence
  Synthetic Polynucleotide
atggccttaccagtgaccgccttgctcctgccgctggccttgctgctccacgccgccaggccggaagtgcagctggttgaatctggcggaggactggttcaggctggcggatctctgagactgtcttgtgccgccagcggcagaacctttagcatgggctggtttagacaggcccctggcaaagagagagagttcgtcgccgccatcacatactctggcggcagcccttactacgccgactctgtgaagggcagattcaccatcagccgggacaacgccaagaacaccgtgtacctccagatgaacagcctgaagcctgaggacaccgccgtgtactactgcgccgccaatccaacatacggcagcgactggaacgccgagaattggggccagggaacccaagtgacagtgtctagcggtaccggcggaggcggatctggcggcggaggtagcggtggcggaggatctgaattcgaagccgacatctaccagacacctagatacctggtcatcggcaccggcaagaaaatcaccctggaatgcagccagacaatgggccacgacaagatgtactggtatcagcaggaccccggcatggaactgcacctgatccactacagctacggcgtgaacagcaccgagaagggcgatctgtctagcgagagcaccgtgtccagaatcagaaccgagcacttcccactgacactggaaagcgccagacctagccacaccagccagtacctgtgtgcctcttctgaggccagaggactggccgagttcaccgacacacagtatttcggccctggcaccagactgaccgttctcgagggacagcctaaggccaatcctaccgtgacactgttccctccaagcagcgaagaactccaggccaacaaggccacacttgtgtgcctgatctccgacttctaccctggggctgtgacagtggcttggaaggccgatggatctcctgtgaaagccggcgtggaaaccaccaagccatccaagcagagcaacaacaaatacgccgccagctcctacctgagcctgacacctgagcagtggaagtcccacagatcctacagctgccaagtgacccacgaaggcagcaccgtggaaaagacagtggcccctacagagtgcagcggatccacaacacctggcgagagaagtagcctgcctgccttctatcctggcaccagcggctcttgttctggctgtggatctctgagcctgcctctgctggctggactggttgctgctgatgctgtggcctctctgctgattgtgggagccgtgttcctgtgcgccagacctagaagaagccccgctcaagaggacggcaaggtgtacatcaacatgcccggcagaggaagcactagtagagtgaagttcagcagaagcgccgacgcccctgcctaccagcagggacagaaccaactgtacaacgagctgaacctgggcagacgggaagagtacgacgtgctggacaagcggagaggcagggaccctgagatgggcggaaagccccagcggagaaagaacccccaggaaggactgtataacgaactccagaaagacaagatggccgaagcctacagcgagatcggcatgaagggcgagcggagaagaggcaagggccacgatggcctgtaccagggcctgagcaccgccaccaaggacacctatgacgccctgcacatgcaggccctgcctccaagaagggccaagcgatctggatctggagcaacaaacttctcactactcaaacaagcaggtgacgtggaggagaatcccgggcctatggactggatttggcgcatccttttccttgtcggcgctgctaccggcgcgcattccttcgaagcccagaccgtgacacagagccagcctgagatgtctgtgcaagaggccgagacagtgaccctgagctgcacctacgataccagcgagagcgactactacctgttctggtacaagcagcctcctagccggcagatgatcctggtcatccggcaagaagcctataagcagcagaacgccaccgagaacagattcagcgtgaacttccagaaggccgccaagagcttcagcctgaagatcagcgatagccagctgggcgacgccgccatgtacttttgcgcttatagaagcgccgtgaacgcccggctgatgtttggagatggcacacagctggtggtcaagcccaacacgcgtgcctctacaaagggaccctccgtgtttcctctggctcccagcagcaagtctacaagcggaggaacagccgctctgggctgcctggtcaaggattactttcccgagcctgtgaccgtgtcctggaatagcggagcactgacaagcggcgtgcacacctttccagccgtgctgcaaagcagcggcctgtactctctgagcagcgtggtcacagtgcctagctctagcctgggcacccagacctacatctgcaatgtgaaccacaagcctagcaacaccaaggtggacaagagagtggaacccaagagctgtggtaccacaacgccgggcgaaaggagttccttgccggccttttaccccggcacaagcggaagctgtagtgggtgtggaagcctcagcctcccacttcttgcgggcctcgtcgcggcagatgcagtagcttcacttcttattgtaggcgcggtatttctctgtgctcgaccaaggaggtcacccgctcaggaggatggtaaggtgtatataaatatgccaggacgcggaagctctagacgggttaagttttccagatccgcagacgcacccgcttaccaacaagggcagaaccaactctacaatgaacttaatttggggcggagggaagagtacgacgttctggacaaaaggaggggacgagatcccgagatgggcggaaagcctcagcgaaggaagaatccgcaagaggggctttataacgaactccagaaagataaaatggcagaagcctatagtgagattgggatgaagggagaaaggaggaggggtaaaggtcacgatgggttgtaccaaggattgagcacagccactaaagatacctatgatgcgctccacatgcaggccctgccgccaagacgcgccaagagaagcggatctggcgtgaagcagaccctgaatttcgacctgctgaagctggctggcgacgtggaatccaacccaggccctggccatatgaccgagtacaagcccacggtgcgcctcgccacccgcgacgacgtccccagggccgtacgcaccctcgccgccgcgttcgccgactaccccgccacgcgccacaccgtcgatccggaccgccacatcgagcgggtcaccgagctgcaagaactcttcctcacgcgcgtcgggctcgacatcggcaaggtgtgggtcgcggacgacggcgccgcggtggcggtctggaccacgccggagagcgtcgaagcgggggcggtgttcgccgagatcggcccgcgcatggccgagttgagcggttcccggctggccgcgcagcaacagatggaaggcctcctggcgccgcaccggcccaaggagcccgcgtggttcctggccaccgtcggcgtctcgcccgaccaccagggcaagggtctgggcagcgccgtcgtgctccccggagtggaggcggccgagcgcgccggggtgcccgccttcctggagacctccgcgccccgcaacctccccttctacgagcggctcggcttcaccgtcaccgccgacgtcgaggtgcccgaaggaccgcgcacctggtgcatgacccgcaagcccggtgcctga

SEQ ID NO: 9549 - DNA, 4209 bp, Artificial Sequence
  Synthetic Polynucleotide
atggccttaccagtgaccgccttgctcctgccgctggccttgctgctccacgccgccaggccggaagtgcagctggttgaatctggcggaggactggttcaggctggcggatctctgagactgtcttgtgccgccagcggcagaacctttagcatgggctggtttagacaggcccctggcaaagagagagagttcgtcgccgccatcacatactctggcggcagcccttactacgccgactctgtgaagggcagattcaccatcagccgggacaacgccaagaacaccgtgtacctccagatgaacagcctgaagcctgaggacaccgccgtgtactactgcgccgccaatccaacatacggcagcgactggaacgccgagaattggggccagggaacccaagtgacagtgtctagcggtaccggcggaggcggatctggcggcggaggtagcggtggcggaggatctgaattcgaagccgacatctaccagacacctagatacctggtcatcggcaccggcaagaaaatcaccctggaatgcagccagacaatgggccacgacaagatgtactggtatcagcaggaccccggcatggaactgcacctgatccactacagctacggcgtgaacagcaccgagaagggcgatctgtctagcgagagcaccgtgtccagaatcagaaccgagcacttcccactgacactggaaagcgccagacctagccacaccagccagtacctgtgtgcctcttctgaggccagaggactggccgagttcaccgacacacagtatttcggccctggcaccagactgaccgttctcgagggacagcctaaggccaatcctaccgtgacactgttccctccaagcagcgaagaactccaggccaacaaggccacacttgtgtgcctgatctccgacttctaccctggggctgtgacagtggcttggaaggccgatggatctcctgtgaaagccggcgtggaaaccaccaagccatccaagcagagcaacaacaaatacgccgccagctcctacctgagcctgacacctgagcagtggaagtcccacagatcctacagctgccaagtgacccacgaaggcagcaccgtggaaaagacagtggcccctacagagtgcagcggatccacaacacctggcgagagaagtagcctgcctgccttctatcctggcaccagcggctcttgttctggctgtggatctctgagcctgcctctgctggctggactggttgctgctgatgctgtggcctctctgctgattgtgggagccgtgttcctgtgcgccagacctagaagaagccccgctcaagaggacggcaaggtgtacatcaacatgcccggcagaggaagcactagtagagtgaagttcagcagaagcgccgacgcccctgcctaccagcagggacagaaccaactgtacaacgagctgaacctgggcagacgggaagagtacgacgtgctggacaagcggagaggcagggaccctgagatgggcggaaagccccagcggagaaagaacccccaggaaggactgtataacgaactccagaaagacaagatggccgaagcctacagcgagatcggcatgaagggcgagcggagaagaggcaagggccacgatggcctgtaccagggcctgagcaccgccaccaaggacacctatgacgccctgcacatgcaggccctgcctccaagaagggccaagcgatctggatctggagcaacaaacttctcactactcaaacaagcaggtgacgtggaggagaatcccgggcctatggactggatttggcgcatccttttccttgtcggcgctgctaccggcgcgcattccgggcccgaagtgcaactggttgaatccggtggcggcctggtgcaagcaggcggatctctcagacttagctgtgccgcctccggcagaaccttcacaatgggatggtttaggcaggctccagggaaagagagagagttcgtcgccgccatctctctgtctcccacactggcctactacgccgactctgtgaaaggccggttcaccatctccagagataatgccaagaacaccgtggtgctgcaaatgaactctctgaaacccgaggatacagccctgtactattgtgccgctgaccggaagtccgtgatgagcatcagacccgattactggggacagggcacacaagtcacagtgtcctctggatccggcggcggaggatctggcggaggcggatctgggggcggaggctctttcgaagcccagaccgtgacacagagccagcctgagatgtctgtgcaagaggccgagacagtgaccctgagctgcacctacgataccagcgagagcgactactacctgttctggtacaagcagcctcctagccggcagatgatcctggtcatccggcaagaagcctataagcagcagaacgccaccgagaacagattcagcgtgaacttccagaaggccgccaagagcttcagcctgaagatcagcgatagccagctgggcgacgccgccatgtacttttgcgcttatagaagcgccgtgaacgcccggctgatgtttggagatggcacacagctggtggtcaagcccaacacgcgtgcctctacaaagggaccctccgtgtttcctctggctcccagcagcaagtctacaagcggaggaacagccgctctgggctgcctggtcaaggattactttcccgagcctgtgaccgtgtcctggaatagcggagcactgacaagcggcgtgcacacctttccagccgtgctgcaaagcagcggcctgtactctctgagcagcgtggtcacagtgcctagctctagcctgggcacccagacctacatctgcaatgtgaaccacaagcctagcaacaccaaggtggacaagagagtggaacccaagagctgtggtaccacaacgccgggcgaaaggagttccttgccggccttttaccccggcacaagcggaagctgtagtgggtgtggaagcctcagcctcccacttcttgcgggcctcgtcgcggcagatgcagtagcttcacttcttattgtaggcgcggtatttctctgtgctcgaccaaggaggtcacccgctcaggaggatggtaaggtgtatataaatatgccaggacgcggaagctctagacgggttaagttttccagatccgcagacgcacccgcttaccaacaagggcagaaccaactctacaatgaacttaatttggggcggagggaagagtacgacgttctggacaaaaggaggggacgagatcccgagatgggcggaaagcctcagcgaaggaagaatccgcaagaggggctttataacgaactccagaaagataaaatggcagaagcctatagtgagattgggatgaagggagaaaggaggaggggtaaaggtcacgatgggttgtaccaaggattgagcacagccactaaagatacctatgatgcgctccacatgcaggccctgccgccaagacgcgccaagagaagcggatctggcgtgaagcagaccctgaatttcgacctgctgaagctggctggcgacgtggaatccaacccaggccctggccatatgaccgagtacaagcccacggtgcgcctcgccacccgcgacgacgtccccagggccgtacgcaccctcgccgccgcgttcgccgactaccccgccacgcgccacaccgtcgatccggaccgccacatcgagcgggtcaccgagctgcaagaactcttcctcacgcgcgtcgggctcgacatcggcaaggtgtgggtcgcggacgacggcgccgcggtggcggtctggaccacgccggagagcgtcgaagcgggggcggtgttcgccgagatcggcccgcgcatggccgagttgagcggttcccggctggccgcgcagcaacagatggaaggcctcctggcgccgcaccggcccaaggagcccgcgtggttcctggccaccgtcggcgtctcgcccgaccaccagggcaagggtctgggcagcgccgtcgtgctccccggagtggaggcggccgagcgcgccggggtgcccgccttcctggagacctccgcgccccgcaacctccccttctacgagcggctcggcttcaccgtcaccgccgacgtcgaggtgcccgaaggaccgcgcacctggtgcatgacccgcaagcccggtgcctga

SEQ ID NO: 9550 - DNA, 2469 bp, Artificial Sequence
  Synthetic Polynucleotide
atggccttaccagtgaccgccttgctcctgccgctggccttgctgctccacgccgccaggccggaattcgaagccgacatctaccagacacctagatacctggtcatcggcaccggcaagaaaatcaccctggaatgcagccagacaatgggccacgacaagatgtactggtatcagcaggaccccggcatggaactgcacctgatccactacagctacggcgtgaacagcaccgagaagggcgatctgtctagcgagagcaccgtgtccagaatcagaaccgagcacttcccactgacactggaaagcgccagacctagccacaccagccagtacctgtgtgcctcttctgaggccagaggactggccgagttcaccgacacacagtatttcggccctggcaccagactgaccgttctcgaggacctgaagaacgtgttcccacctgaggtggccgtgttcgagcctagcgaggccgagatcagccacacccagaaagccaccctcgtgtgcctggctaccggcttctaccccgaccatgtggaactgtcttggtgggtcaacggcaaagaggtgcacagcggcgtgtctaccgacccccagccactgaaagaacagcccgccctgaacgacagccggtactgcctgagcagcagactgagagtgtccgccaccttctggcagaacccccggaaccacttcagatgccaggtgcagttctacggcctgagcgagaacgacgagtggacccaggacagagccaagcccgtgacccagatcgtgtctgccgaagcctggggcagagccgattgcggatcccagagcttcggcctgctggaccccaagctgtgctacctgctggatggcatcctgttcatctacggcgtgatcctgaccgccctgttcctgagagtgaagttcagcagaagcgccgacgcccctgcctaccagcagggacagaaccaactgtacaacgagctgaacctgggcagacgggaagagtacgacgtgctggacaagcggagaggcagggaccctgagatgggcggaaagccccagcggagaaagaacccccaggaaggactgtataacgaactccagaaagacaagatggccgaagcctacagcgagatcggcatgaagggcgagcggagaagaggcaagggccacgatggcctgtaccagggcctgagcaccgccaccaaggacacctatgacgccctgcacatgcaggccctgcctccaagaagggccaagcgatctggatctggagcaacaaacttctcactactcaaacaagcaggtgacgtggaggagaatcccgggcctactagtatggactggatttggcgcatccttttccttgtcggcgctgctaccggcgcgcattccttcgaagcccagaccgtgacacagagccagcctgagatgtctgtgcaagaggccgagacagtgaccctgagctgcacctacgataccagcgagagcgactactacctgttctggtacaagcagcctcctagccggcagatgatcctggtcatccggcaagaagcctataagcagcagaacgccaccgagaacagattcagcgtgaacttccagaaggccgccaagagcttcagcctgaagatcagcgatagccagctgggcgacgccgccatgtacttttgcgcttatagaagcgccgtgaacgcccggctgatgtttggagatggcacacagctggtggtcaagcccaacacgcgtatccagaaccctgatcctgccgtgtaccagctgcgggatagcaagagcagcgacaagagcgtgtgtctgttcaccgacttcgacagccagaccaacgtgtcccagagcaaggactccgacgtgtacatcaccgataagaccgtgctggacatgcggagcatggacttcaagagcaactccgccgtggcctggtccaacaagtccgatttcgcctgcgccaacgccttcaacaacagcattatccccgaggacacattcttcccaagccccgagagcagctgcggtacccagagttttgggttgttggaccctaaattgtgctatctgttggacggaatcctgttcatttacggagtgatcctgaccgcattgttcctgcgggttaagttttccagatccgcagacgcacccgcttaccaacaagggcagaaccaactctacaatgaacttaatttggggcggagggaagagtacgacgttctggacaaaaggaggggacgagatcccgagatgggcggaaagcctcagcgaaggaagaatccgcaagaggggctttataacgaactccagaaagataaaatggcagaagcctatagtgagattgggatgaagggagaaaggaggaggggtaaaggtcacgatgggttgtaccaaggattgagcacagccactaaagatacctatgatgcgctccacatgcaggccctgccgccaagataa

SEQ ID NO: 9551 - DNA, 2595 bp, Artificial Sequence
  Synthetic Polynucleotide
atggccttaccagtgaccgccttgctcctgccgctggccttgctgctccacgccgccaggccggaattcgaagccgacatctaccagacacctagatacctggtcatcggcaccggcaagaaaatcaccctggaatgcagccagacaatgggccacgacaagatgtactggtatcagcaggaccccggcatggaactgcacctgatccactacagctacggcgtgaacagcaccgagaagggcgatctgtctagcgagagcaccgtgtccagaatcagaaccgagcacttcccactgacactggaaagcgccagacctagccacaccagccagtacctgtgtgcctcttctgaggccagaggactggccgagttcaccgacacacagtatttcggccctggcaccagactgaccgttctcgaggacctgaagaacgtgttcccacctgaggtggccgtgttcgagcctagcgaggccgagatcagccacacccagaaagccaccctcgtgtgcctggctaccggcttctaccccgaccatgtggaactgtcttggtgggtcaacggcaaagaggtgcacagcggcgtgtctaccgacccccagccactgaaagaacagcccgccctgaacgacagccggtactgcctgagcagcagactgagagtgtccgccaccttctggcagaacccccggaaccacttcagatgccaggtgcagttctacggcctgagcgagaacgacgagtggacccaggacagagccaagcccgtgacccagatcgtgtctgccgaagcctggggcagagccgattgcggatcccagagcttcggcctgctggaccccaagctgtgctacctgctggatggcatcctgttcatctacggcgtgatcctgaccgccctgttcctgagagtgaagttcagcagaagcgccgacgcccctgcctaccagcagggacagaaccaactgtacaacgagctgaacctgggcagacgggaagagtacgacgtgctggacaagcggagaggcagggaccctgagatgggcggaaagccccagcggagaaagaacccccaggaaggactgtataacgaactccagaaagacaagatggccgaagcctacagcgagatcggcatgaagggcgagcggagaagaggcaagggccacgatggcctgtaccagggcctgagcaccgccaccaaggacacctatgacgccctgcacatgcaggccctgcctccaagaagggccaagcgatctggatctggagcaacaaacttctcactactcaaacaagcaggtgacgtggaggagaatcccgggcctactagtatggactggatttggcgcatccttttccttgtcggcgctgctaccggcgcgcattccttcgaagcccagaccgtgacacagagccagcctgagatgtctgtgcaagaggccgagacagtgaccctgagctgcacctacgataccagcgagagcgactactacctgttctggtacaagcagcctcctagccggcagatgatcctggtcatccggcaagaagcctataagcagcagaacgccaccgagaacagattcagcgtgaacttccagaaggccgccaagagcttcagcctgaagatcagcgatagccagctgggcgacgccgccatgtacttttgcgcttatagaagcgccgtgaacgcccggctgatgtttggagatggcacacagctggtggtcaagcccaacacgcgtatccagaaccctgatcctgccgtgtaccagctgcgggatagcaagagcagcgacaagagcgtgtgtctgttcaccgacttcgacagccagaccaacgtgtcccagagcaaggactccgacgtgtacatcaccgataagaccgtgctggacatgcggagcatggacttcaagagcaactccgccgtggcctggtccaacaagtccgatttcgcctgcgccaacgccttcaacaacagcattatccccgaggacacattcttcccaagccccgagagcagctgcggtacccagagcttcggcctgctggaccccaagctgtgctacctgctggatggcatcctgttcatctacggcgtgatcctgaccgccctgttcctgaaacggggcagaaagaaactcctgtatatattcaaacaaccatttatgagaccagtacaaactactcaagaggaagatggctgtagctgccgatttccagaagaagaagaaggaggatgtgaactgagagtgaagttcagcagaagcgccgacgcccctgcctaccagcagggacagaaccaactgtacaacgagctgaacctgggcagacgggaagagtacgacgtgctggacaagcggagaggcagggaccctgagatgggcggaaagccccagcggagaaagaacccccaggaaggactgtataacgaactccagaaagacaagatggccgaagcctacagcgagatcggcatgaagggcgagcggagaagaggcaagggccacgatggcctgtaccagggcctgagcaccgccaccaaggacacctatgacgccctgcacatgcaggccctgcctccaagataa

SEQ ID NO: 9552 - DNA, 2592 bp, Artificial Sequence
  Synthetic Polynucleotide
atggccttaccagtgaccgccttgctcctgccgctggccttgctgctccacgccgccaggccggaattcgaagccgacatctaccagacacctagatacctggtcatcggcaccggcaagaaaatcaccctggaatgcagccagacaatgggccacgacaagatgtactggtatcagcaggaccccggcatggaactgcacctgatccactacagctacggcgtgaacagcaccgagaagggcgatctgtctagcgagagcaccgtgtccagaatcagaaccgagcacttcccactgacactggaaagcgccagacctagccacaccagccagtacctgtgtgcctcttctgaggccagaggactggccgagttcaccgacacacagtatttcggccctggcaccagactgaccgttctcgaggacctgaagaacgtgttcccacctgaggtggccgtgttcgagcctagcgaggccgagatcagccacacccagaaagccaccctcgtgtgcctggctaccggcttctaccccgaccatgtggaactgtcttggtgggtcaacggcaaagaggtgcacagcggcgtgtctaccgacccccagccactgaaagaacagcccgccctgaacgacagccggtactgcctgagcagcagactgagagtgtccgccaccttctggcagaacccccggaaccacttcagatgccaggtgcagttctacggcctgagcgagaacgacgagtggacccaggacagagccaagcccgtgacccagatcgtgtctgccgaagcctggggcagagccgattgcggatcccagagcttcggcctgctggaccccaagctgtgctacctgctggatggcatcctgttcatctacggcgtgatcctgaccgccctgttcctgagagtgaagttcagcagaagcgccgacgcccctgcctaccagcagggacagaaccaactgtacaacgagctgaacctgggcagacgggaagagtacgacgtgctggacaagcggagaggcagggaccctgagatgggcggaaagccccagcggagaaagaacccccaggaaggactgtataacgaactccagaaagacaagatggccgaagcctacagcgagatcggcatgaagggcgagcggagaagaggcaagggccacgatggcctgtaccagggcctgagcaccgccaccaaggacacctatgacgccctgcacatgcaggccctgcctccaagaagggccaagcgatctggatctggagcaacaaacttctcactactcaaacaagcaggtgacgtggaggagaatcccgggcctactagtatggactggatttggcgcatccttttccttgtcggcgctgctaccggcgcgcattccttcgaagcccagaccgtgacacagagccagcctgagatgtctgtgcaagaggccgagacagtgaccctgagctgcacctacgataccagcgagagcgactactacctgttctggtacaagcagcctcctagccggcagatgatcctggtcatccggcaagaagcctataagcagcagaacgccaccgagaacagattcagcgtgaacttccagaaggccgccaagagcttcagcctgaagatcagcgatagccagctgggcgacgccgccatgtacttttgcgcttatagaagcgccgtgaacgcccggctgatgtttggagatggcacacagctggtggtcaagcccaacacgcgtatccagaaccctgatcctgccgtgtaccagctgcgggatagcaagagcagcgacaagagcgtgtgtctgttcaccgacttcgacagccagaccaacgtgtcccagagcaaggactccgacgtgtacatcaccgataagaccgtgctggacatgcggagcatggacttcaagagcaactccgccgtggcctggtccaacaagtccgatttcgcctgcgccaacgccttcaacaacagcattatccccgaggacacattcttcccaagccccgagagcagctgcggtacccagagcttcggcctgctggaccccaagctgtgctacctgctggatggcatcctgttcatctacggcgtgatcctgaccgccctgttcctgaggagtaagaggagcaggctcctgcacagtgactacatgaacatgactccacgccgccccggacccacccgcaagcattaccagccctatgccccaccacgcgacttcgcagcctatcgctccagagtgaagttcagcagaagcgccgacgcccctgcctaccagcagggacagaaccaactgtacaacgagctgaacctgggcagacgggaagagtacgacgtgctggacaagcggagaggcagggaccctgagatgggcggaaagccccagcggagaaagaacccccaggaaggactgtataacgaactccagaaagacaagatggccgaagcctacagcgagatcggcatgaagggcgagcggagaagaggcaagggccacgatggcctgtaccagggcctgagcaccgccaccaaggacacctatgacgccctgcacatgcaggccctgcctccaagataa

SEQ ID NO: 9553 - DNA, 2577 bp, Artificial Sequence
  Synthetic Polynucleotide
atggccttaccagtgaccgccttgctcctgccgctggccttgctgctccacgccgccaggccggaattcgaagccgacatctaccagacacctagatacctggtcatcggcaccggcaagaaaatcaccctggaatgcagccagacaatgggccacgacaagatgtactggtatcagcaggaccccggcatggaactgcacctgatccactacagctacggcgtgaacagcaccgagaagggcgatctgtctagcgagagcaccgtgtccagaatcagaaccgagcacttcccactgacactggaaagcgccagacctagccacaccagccagtacctgtgtgcctcttctgaggccagaggactggccgagttcaccgacacacagtatttcggccctggcaccagactgaccgttctcgaggacctgaagaacgtgttcccacctgaggtggccgtgttcgagcctagcgaggccgagatcagccacacccagaaagccaccctcgtgtgcctggctaccggcttctaccccgaccatgtggaactgtcttggtgggtcaacggcaaagaggtgcacagcggcgtgtctaccgacccccagccactgaaagaacagcccgccctgaacgacagccggtactgcctgagcagcagactgagagtgtccgccaccttctggcagaacccccggaaccacttcagatgccaggtgcagttctacggcctgagcgagaacgacgagtggacccaggacagagccaagcccgtgacccagatcgtgtctgccgaagcctggggcagagccgattgcggatcccagagcttcggcctgctggaccccaagctgtgctacctgctggatggcatcctgttcatctacggcgtgatcctgaccgccctgttcctgagagtgaagttcagcagaagcgccgacgcccctgcctaccagcagggacagaaccaactgtacaacgagctgaacctgggcagacgggaagagtacgacgtgctggacaagcggagaggcagggaccctgagatgggcggaaagccccagcggagaaagaacccccaggaaggactgtataacgaactccagaaagacaagatggccgaagcctacagcgagatcggcatgaagggcgagcggagaagaggcaagggccacgatggcctgtaccagggcctgagcaccgccaccaaggacacctatgacgccctgcacatgcaggccctgcctccaagaagggccaagcgatctggatctggagcaacaaacttctcactactcaaacaagcaggtgacgtggaggagaatcccgggcctactagtatggactggatttggcgcatccttttccttgtcggcgctgctaccggcgcgcattccttcgaagcccagaccgtgacacagagccagcctgagatgtctgtgcaagaggccgagacagtgaccctgagctgcacctacgataccagcgagagcgactactacctgttctggtacaagcagcctcctagccggcagatgatcctggtcatccggcaagaagcctataagcagcagaacgccaccgagaacagattcagcgtgaacttccagaaggccgccaagagcttcagcctgaagatcagcgatagccagctgggcgacgccgccatgtacttttgcgcttatagaagcgccgtgaacgcccggctgatgtttggagatggcacacagctggtggtcaagcccaacacgcgtatccagaaccctgatcctgccgtgtaccagctgcgggatagcaagagcagcgacaagagcgtgtgtctgttcaccgacttcgacagccagaccaacgtgtcccagagcaaggactccgacgtgtacatcaccgataagaccgtgctggacatgcggagcatggacttcaagagcaactccgccgtggcctggtccaacaagtccgatttcgcctgcgccaacgccttcaacaacagcattatccccgaggacacattcttcccaagccccgagagcagctgcggtacccagagcttcggcctgctggaccccaagctgtgctacctgctggatggcatcctgttcatctacggcgtgatcctgaccgccctgttcctgagggaccaaagactgcctcctgacgctcacaaacctccaggcggaggcagcttcagaacccctatccaagaggaacaggctgacgcccacagcaccctggcaaaaattagagtgaagttcagcagaagcgccgacgcccctgcctaccagcagggacagaaccaactgtacaacgagctgaacctgggcagacgggaagagtacgacgtgctggacaagcggagaggcagggaccctgagatgggcggaaagccccagcggagaaagaacccccaggaaggactgtataacgaactccagaaagacaagatggccgaagcctacagcgagatcggcatgaagggcgagcggagaagaggcaagggccacgatggcctgtaccagggcctgagcaccgccaccaaggacacctatgacgccctgcacatgcaggccctgcctccaagataa

SEQ ID NO: 9554 - DNA, 2829 bp, Artificial Sequence
  Synthetic Polynucleotide
atggccttaccagtgaccgccttgctcctgccgctggccttgctgctccacgccgccaggccggaattcgaagccgacatctaccagacacctagatacctggtcatcggcaccggcaagaaaatcaccctggaatgcagccagacaatgggccacgacaagatgtactggtatcagcaggaccccggcatggaactgcacctgatccactacagctacggcgtgaacagcaccgagaagggcgatctgtctagcgagagcaccgtgtccagaatcagaaccgagcacttcccactgacactggaaagcgccagacctagccacaccagccagtacctgtgtgcctcttctgaggccagaggactggccgagttcaccgacacacagtatttcggccctggcaccagactgaccgttctcgaggacctgaagaacgtgttcccacctgaggtggccgtgttcgagcctagcgaggccgagatcagccacacccagaaagccaccctcgtgtgcctggctaccggcttctaccccgaccatgtggaactgtcttggtgggtcaacggcaaagaggtgcacagcggcgtgtctaccgacccccagccactgaaagaacagcccgccctgaacgacagccggtactgcctgagcagcagactgagagtgtccgccaccttctggcagaacccccggaaccacttcagatgccaggtgcagttctacggcctgagcgagaacgacgagtggacccaggacagagccaagcccgtgacccagatcgtgtctgccgaagcctggggcagagccgattgcggatcccagagcttcggcctgctggaccccaagctgtgctacctgctggatggcatcctgttcatctacggcgtgatcctgaccgccctgttcctgagagtgaagttcagcagaagcgccgacgcccctgcctaccagcagggacagaaccaactgtacaacgagctgaacctgggcagacgggaagagtacgacgtgctggacaagcggagaggcagggaccctgagatgggcggaaagccccagcggagaaagaacccccaggaaggactgtataacgaactccagaaagacaagatggccgaagcctacagcgagatcggcatgaagggcgagcggagaagaggcaagggccacgatggcctgtaccagggcctgagcaccgccaccaaggacacctatgacgccctgcacatgcaggccctgcctccaagaagggccaagcgatctggatctggagcaacaaacttctcactactcaaacaagcaggtgacgtggaggagaatcccgggcctactagtatggactggatttggcgcatccttttccttgtcggcgctgctaccggcgcgcattccttcgaagcccagaccgtgacacagagccagcctgagatgtctgtgcaagaggccgagacagtgaccctgagctgcacctacgataccagcgagagcgactactacctgttctggtacaagcagcctcctagccggcagatgatcctggtcatccggcaagaagcctataagcagcagaacgccaccgagaacagattcagcgtgaacttccagaaggccgccaagagcttcagcctgaagatcagcgatagccagctgggcgacgccgccatgtacttttgcgcttatagaagcgccgtgaacgcccggctgatgtttggagatggcacacagctggtggtcaagcccaacacgcgtatccagaaccctgatcctgccgtgtaccagctgcgggatagcaagagcagcgacaagagcgtgtgtctgttcaccgacttcgacagccagaccaacgtgtcccagagcaaggactccgacgtgtacatcaccgataagaccgtgctggacatgcggagcatggacttcaagagcaactccgccgtggcctggtccaacaagtccgatttcgcctgcgccaacgccttcaacaacagcattatccccgaggacacattcttcccaagccccgagagcagctgcggtacccagagcttcggcctgctggaccccaagctgtgctacctgctggatggcatcctgttcatctacggcgtgatcctgaccgccctgttcctgtggcggcggaagcggaaagagaagcagtctgagacaagccccaaagagttcctgaccatctacgaggacgtgaaggacctgaaaacccggcggaaccacgaacaagagcagacctttcctggcggaggcagcaccatctacagcatgatccagagccagagcagcgcccctacaagccaagagcctgcctacacactgtactccctgatccagcctagcagaaagagcggcagccggaagagaaatcacagccccagcttcaacagcacgatctacgaagtgatcggcaagagccagccaaaggctcagaaccctgccagactgagccggaaagagctggaaaacttcgacgtgtacagcagagtgaagttcagcagaagcgccgacgcccctgcctaccagcagggacagaaccaactgtacaacgagctgaacctgggcagacgggaagagtacgacgtgctggacaagcggagaggcagggaccctgagatgggcggaaagccccagcggagaaagaacccccaggaaggactgtataacgaactccagaaagacaagatggccgaagcctacagcgagatcggcatgaagggcgagcggagaagaggcaagggccacgatggcctgtaccagggcctgagcaccgccaccaaggacacctatgacgccctgcacatgcaggccctgcctccaagataa

SEQ ID NO: 9555 - DNA, 2718 bp, Artificial Sequence
  Synthetic Polynucleotide
atggccttaccagtgaccgccttgctcctgccgctggccttgctgctccacgccgccaggccggaattcgaagccgacatctaccagacacctagatacctggtcatcggcaccggcaagaaaatcaccctggaatgcagccagacaatgggccacgacaagatgtactggtatcagcaggaccccggcatggaactgcacctgatccactacagctacggcgtgaacagcaccgagaagggcgatctgtctagcgagagcaccgtgtccagaatcagaaccgagcacttcccactgacactggaaagcgccagacctagccacaccagccagtacctgtgtgcctcttctgaggccagaggactggccgagttcaccgacacacagtatttcggccctggcaccagactgaccgttctcgaggacctgaagaacgtgttcccacctgaggtggccgtgttcgagcctagcgaggccgagatcagccacacccagaaagccaccctcgtgtgcctggctaccggcttctaccccgaccatgtggaactgtcttggtgggtcaacggcaaagaggtgcacagcggcgtgtctaccgacccccagccactgaaagaacagcccgccctgaacgacagccggtactgcctgagcagcagactgagagtgtccgccaccttctggcagaacccccggaaccacttcagatgccaggtgcagttctacggcctgagcgagaacgacgagtggacccaggacagagccaagcccgtgacccagatcgtgtctgccgaagcctggggcagagccgattgcggatcccagagcttcggcctgctggaccccaagctgtgctacctgctggatggcatcctgttcatctacggcgtgatcctgaccgccctgttcctgaggagtaagaggagcaggctcctgcacagtgactacatgaacatgactccacgccgccccggacccacccgcaagcattaccagccctatgccccaccacgcgacttcgcagcctatcgctccagagtgaagttcagcagaagcgccgacgcccctgcctaccagcagggacagaaccaactgtacaacgagctgaacctgggcagacgggaagagtacgacgtgctggacaagcggagaggcagggaccctgagatgggcggaaagccccagcggagaaagaacccccaggaaggactgtataacgaactccagaaagacaagatggccgaagcctacagcgagatcggcatgaagggcgagcggagaagaggcaagggccacgatggcctgtaccagggcctgagcaccgccaccaaggacacctatgacgccctgcacatgcaggccctgcctccaagaagggccaagcgatctggatctggagcaacaaacttctcactactcaaacaagcaggtgacgtggaggagaatcccgggcctactagtatggactggatttggcgcatccttttccttgtcggcgctgctaccggcgcgcattccttcgaagcccagaccgtgacacagagccagcctgagatgtctgtgcaagaggccgagacagtgaccctgagctgcacctacgataccagcgagagcgactactacctgttctggtacaagcagcctcctagccggcagatgatcctggtcatccggcaagaagcctataagcagcagaacgccaccgagaacagattcagcgtgaacttccagaaggccgccaagagcttcagcctgaagatcagcgatagccagctgggcgacgccgccatgtacttttgcgcttatagaagcgccgtgaacgcccggctgatgtttggagatggcacacagctggtggtcaagcccaacacgcgtatccagaaccctgatcctgccgtgtaccagctgcgggatagcaagagcagcgacaagagcgtgtgtctgttcaccgacttcgacagccagaccaacgtgtcccagagcaaggactccgacgtgtacatcaccgataagaccgtgctggacatgcggagcatggacttcaagagcaactccgccgtggcctggtccaacaagtccgatttcgcctgcgccaacgccttcaacaacagcattatccccgaggacacattcttcccaagccccgagagcagctgcggtacccagagcttcggcctgctggaccccaagctgtgctacctgctggatggcatcctgttcatctacggcgtgatcctgaccgccctgttcctgaaacggggcagaaagaaactcctgtatatattcaaacaaccatttatgagaccagtacaaactactcaagaggaagatggctgtagctgccgatttccagaagaagaagaaggaggatgtgaactgagagtgaagttcagcagaagcgccgacgcccctgcctaccagcagggacagaaccaactgtacaacgagctgaacctgggcagacgggaagagtacgacgtgctggacaagcggagaggcagggaccctgagatgggcggaaagccccagcggagaaagaacccccaggaaggactgtataacgaactccagaaagacaagatggccgaagcctacagcgagatcggcatgaagggcgagcggagaagaggcaagggccacgatggcctgtaccagggcctgagcaccgccaccaaggacacctatgacgccctgcacatgcaggccctgcctccaagataa

SEQ ID NO: 9556 - DNA, 2715 bp, Artificial Sequence
  Synthetic Polynucleotide
atggccttaccagtgaccgccttgctcctgccgctggccttgctgctccacgccgccaggccggaattcgaagccgacatctaccagacacctagatacctggtcatcggcaccggcaagaaaatcaccctggaatgcagccagacaatgggccacgacaagatgtactggtatcagcaggaccccggcatggaactgcacctgatccactacagctacggcgtgaacagcaccgagaagggcgatctgtctagcgagagcaccgtgtccagaatcagaaccgagcacttcccactgacactggaaagcgccagacctagccacaccagccagtacctgtgtgcctcttctgaggccagaggactggccgagttcaccgacacacagtatttcggccctggcaccagactgaccgttctcgaggacctgaagaacgtgttcccacctgaggtggccgtgttcgagcctagcgaggccgagatcagccacacccagaaagccaccctcgtgtgcctggctaccggcttctaccccgaccatgtggaactgtcttggtgggtcaacggcaaagaggtgcacagcggcgtgtctaccgacccccagccactgaaagaacagcccgccctgaacgacagccggtactgcctgagcagcagactgagagtgtccgccaccttctggcagaacccccggaaccacttcagatgccaggtgcagttctacggcctgagcgagaacgacgagtggacccaggacagagccaagcccgtgacccagatcgtgtctgccgaagcctggggcagagccgattgcggatcccagagcttcggcctgctggaccccaagctgtgctacctgctggatggcatcctgttcatctacggcgtgatcctgaccgccctgttcctgaggagtaagaggagcaggctcctgcacagtgactacatgaacatgactccacgccgccccggacccacccgcaagcattaccagccctatgccccaccacgcgacttcgcagcctatcgctccagagtgaagttcagcagaagcgccgacgcccctgcctaccagcagggacagaaccaactgtacaacgagctgaacctgggcagacgggaagagtacgacgtgctggacaagcggagaggcagggaccctgagatgggcggaaagccccagcggagaaagaacccccaggaaggactgtataacgaactccagaaagacaagatggccgaagcctacagcgagatcggcatgaagggcgagcggagaagaggcaagggccacgatggcctgtaccagggcctgagcaccgccaccaaggacacctatgacgccctgcacatgcaggccctgcctccaagaagggccaagcgatctggatctggagcaacaaacttctcactactcaaacaagcaggtgacgtggaggagaatcccgggcctactagtatggactggatttggcgcatccttttccttgtcggcgctgctaccggcgcgcattccttcgaagcccagaccgtgacacagagccagcctgagatgtctgtgcaagaggccgagacagtgaccctgagctgcacctacgataccagcgagagcgactactacctgttctggtacaagcagcctcctagccggcagatgatcctggtcatccggcaagaagcctataagcagcagaacgccaccgagaacagattcagcgtgaacttccagaaggccgccaagagcttcagcctgaagatcagcgatagccagctgggcgacgccgccatgtacttttgcgcttatagaagcgccgtgaacgcccggctgatgtttggagatggcacacagctggtggtcaagcccaacacgcgtatccagaaccctgatcctgccgtgtaccagctgcgggatagcaagagcagcgacaagagcgtgtgtctgttcaccgacttcgacagccagaccaacgtgtcccagagcaaggactccgacgtgtacatcaccgataagaccgtgctggacatgcggagcatggacttcaagagcaactccgccgtggcctggtccaacaagtccgatttcgcctgcgccaacgccttcaacaacagcattatccccgaggacacattcttcccaagccccgagagcagctgcggtacccagagttttgggttgttggaccctaaattgtgctatctgttggacggaatcctgttcatttacggagtgatcctgaccgcattgttcctgaggagcaagcggtcacggctgctccacagcgattacatgaatatgacaccacgaagaccgggtcctactcgcaaacactaccaaccctacgcacctccccgcgactttgcagcgtaccgatctcgggttaagttttccagatccgcagacgcacccgcttaccaacaagggcagaaccaactctacaatgaacttaatttggggcggagggaagagtacgacgttctggacaaaaggaggggacgagatcccgagatgggcggaaagcctcagcgaaggaagaatccgcaagaggggctttataacgaactccagaaagataaaatggcagaagcctatagtgagattgggatgaagggagaaaggaggaggggtaaaggtcacgatgggttgtaccaaggattgagcacagccactaaagatacctatgatgcgctccacatgcaggccctgccgccaagataa

SEQ ID NO: 9557 - DNA, 2718 bp, Artificial Sequence
  Synthetic Polynucleotide
atggccttaccagtgaccgccttgctcctgccgctggccttgctgctccacgccgccaggccggaattcgaagccgacatctaccagacacctagatacctggtcatcggcaccggcaagaaaatcaccctggaatgcagccagacaatgggccacgacaagatgtactggtatcagcaggaccccggcatggaactgcacctgatccactacagctacggcgtgaacagcaccgagaagggcgatctgtctagcgagagcaccgtgtccagaatcagaaccgagcacttcccactgacactggaaagcgccagacctagccacaccagccagtacctgtgtgcctcttctgaggccagaggactggccgagttcaccgacacacagtatttcggccctggcaccagactgaccgttctcgaggacctgaagaacgtgttcccacctgaggtggccgtgttcgagcctagcgaggccgagatcagccacacccagaaagccaccctcgtgtgcctggctaccggcttctaccccgaccatgtggaactgtcttggtgggtcaacggcaaagaggtgcacagcggcgtgtctaccgacccccagccactgaaagaacagcccgccctgaacgacagccggtactgcctgagcagcagactgagagtgtccgccaccttctggcagaacccccggaaccacttcagatgccaggtgcagttctacggcctgagcgagaacgacgagtggacccaggacagagccaagcccgtgacccagatcgtgtctgccgaagcctggggcagagccgattgcggatcccagagcttcggcctgctggaccccaagctgtgctacctgctggatggcatcctgttcatctacggcgtgatcctgaccgccctgttcctgaggagtaagaggagcaggctcctgcacagtgactacatgaacatgactccacgccgccccggacccacccgcaagcattaccagccctatgccccaccacgcgacttcgcagcctatcgctccagagtgaagttcagcagaagcgccgacgcccctgcctaccagcagggacagaaccaactgtacaacgagctgaacctgggcagacgggaagagtacgacgtgctggacaagcggagaggcagggaccctgagatgggcggaaagccccagcggagaaagaacccccaggaaggactgtataacgaactccagaaagacaagatggccgaagcctacagcgagatcggcatgaagggcgagcggagaagaggcaagggccacgatggcctgtaccagggcctgagcaccgccaccaaggacacctatgacgccctgcacatgcaggccctgcctccaagaagggccaagcgatctggatctggagcaacaaacttctcactactcaaacaagcaggtgacgtggaggagaatcccgggcctactagtatggactggatttggcgcatccttttccttgtcggcgctgctaccggcgcgcattccttcgaagcccagaccgtgacacagagccagcctgagatgtctgtgcaagaggccgagacagtgaccctgagctgcacctacgataccagcgagagcgactactacctgttctggtacaagcagcctcctagccggcagatgatcctggtcatccggcaagaagcctataagcagcagaacgccaccgagaacagattcagcgtgaacttccagaaggccgccaagagcttcagcctgaagatcagcgatagccagctgggcgacgccgccatgtacttttgcgcttatagaagcgccgtgaacgcccggctgatgtttggagatggcacacagctggtggtcaagcccaacacgcgtatccagaaccctgatcctgccgtgtaccagctgcgggatagcaagagcagcgacaagagcgtgtgtctgttcaccgacttcgacagccagaccaacgtgtcccagagcaaggactccgacgtgtacatcaccgataagaccgtgctggacatgcggagcatggacttcaagagcaactccgccgtggcctggtccaacaagtccgatttcgcctgcgccaacgccttcaacaacagcattatccccgaggacacattcttcccaagccccgagagcagctgcggtacccagagttttgggttgttggaccctaaattgtgctatctgttggacggaatcctgttcatttacggagtgatcctgaccgcattgttcctgaagagaggccggaagaagctgctgtacatcttcaagcagcctttcatgcggcccgtgcagaccacccaggaagaggacggctgctcctgccggttccccgaggaagaagaaggcggctgcgagctgcgggttaagttttccagatccgcagacgcacccgcttaccaacaagggcagaaccaactctacaatgaacttaatttggggcggagggaagagtacgacgttctggacaaaaggaggggacgagatcccgagatgggcggaaagcctcagcgaaggaagaatccgcaagaggggctttataacgaactccagaaagataaaatggcagaagcctatagtgagattgggatgaagggagaaaggaggaggggtaaaggtcacgatgggttgtaccaaggattgagcacagccactaaagatacctatgatgcgctccacatgcaggccctgccgccaagataa

SEQ ID NO: 9558 - DNA, 2469 bp, Artificial Sequence
  Synthetic Polynucleotide
atggccttaccagtgaccgccttgctcctgccgctggccttgctgctccacgccgccaggccggaattcgaagccgacatctaccagacacctagatacctggtcatcggcaccggcaagaaaatcaccctggaatgcagccagacaatgggccacgacaagatgtactggtatcagcaggaccccggcatggaactgcacctgatccactacagctacggcgtgaacagcaccgagaagggcgatctgtctagcgagagcaccgtgtccagaatcagaaccgagcacttcccactgacactggaaagcgccagacctagccacaccagccagtacctgtgtgcctcttctgaggccagaggactggccgagttcaccgacacacagtatttcggccctggcaccagactgaccgttctcgaggacctgaagaacgtgttcccacctgaggtggccgtgttcgagcctagcgaggccgagatcagccacacccagaaagccaccctcgtgtgcctggctaccggcttctaccccgaccatgtggaactgtcttggtgggtcaacggcaaagaggtgcacagcggcgtgtctaccgacccccagccactgaaagaacagcccgccctgaacgacagccggtactgcctgagcagcagactgagagtgtccgccaccttctggcagaacccccggaaccacttcagatgccaggtgcagttctacggcctgagcgagaacgacgagtggacccaggacagagccaagcccgtgacccagatcgtgtctgccgaagcctggggcagagccgattgcggatcccagagcttcggcctgctggaccccaagctgtgctacctgctggatggcatcctgttcatctacggcgtgatcctgaccgccctgttcctgagagtgaagttcagcagaagcgccgacgcccctgcctaccagcagggacagaaccaactgtacaacgagctgaacctgggcagacgggaagagtacgacgtgctggacaagcggagaggcagggaccctgagatgggcggaaagccccagcggagaaagaacccccaggaaggactgttcaacgaactccagaaagacaagatggccgaagccttcagcgagatcggcatgaagggcgagcggagaagaggcaagggccacgatggcctgttccagggcctgagcaccgccaccaaggacaccttcgacgccctgcacatgcaggccctgcctccaagaagggccaagcgatctggatctggagcaacaaacttctcactactcaaacaagcaggtgacgtggaggagaatcccgggcctactagtatggactggatttggcgcatccttttccttgtcggcgctgctaccggcgcgcattccttcgaagcccagaccgtgacacagagccagcctgagatgtctgtgcaagaggccgagacagtgaccctgagctgcacctacgataccagcgagagcgactactacctgttctggtacaagcagcctcctagccggcagatgatcctggtcatccggcaagaagcctataagcagcagaacgccaccgagaacagattcagcgtgaacttccagaaggccgccaagagcttcagcctgaagatcagcgatagccagctgggcgacgccgccatgtacttttgcgcttatagaagcgccgtgaacgcccggctgatgtttggagatggcacacagctggtggtcaagcccaacacgcgtatccagaaccctgatcctgccgtgtaccagctgcgggatagcaagagcagcgacaagagcgtgtgtctgttcaccgacttcgacagccagaccaacgtgtcccagagcaaggactccgacgtgtacatcaccgataagaccgtgctggacatgcggagcatggacttcaagagcaactccgccgtggcctggtccaacaagtccgatttcgcctgcgccaacgccttcaacaacagcattatccccgaggacacattcttcccaagccccgagagcagctgcggtacccagagttttgggttgttggaccctaaattgtgctatctgttggacggaatcctgttcatttacggagtgatcctgaccgcattgttcctgcgggttaagttttccagatccgcagacgcacccgcttaccaacaagggcagaaccaactctacaatgaacttaatttggggcggagggaagagtacgacgttctggacaaaaggaggggacgagatcccgagatgggcggaaagcctcagcgaaggaagaatccgcaagaggggctttataacgaactccagaaagataaaatggcagaagcctatagtgagattgggatgaagggagaaaggaggaggggtaaaggtcacgatgggttgtaccaaggattgagcacagccactaaagatacctatgatgcgctccacatgcaggccctgccgccaagataa

SEQ ID NO: 9559 - DNA, 2469 bp, Artificial Sequence
  Synthetic Polynucleotide
atggccttaccagtgaccgccttgctcctgccgctggccttgctgctccacgccgccaggccggaattcgaagccgacatctaccagacacctagatacctggtcatcggcaccggcaagaaaatcaccctggaatgcagccagacaatgggccacgacaagatgtactggtatcagcaggaccccggcatggaactgcacctgatccactacagctacggcgtgaacagcaccgagaagggcgatctgtctagcgagagcaccgtgtccagaatcagaaccgagcacttcccactgacactggaaagcgccagacctagccacaccagccagtacctgtgtgcctcttctgaggccagaggactggccgagttcaccgacacacagtatttcggccctggcaccagactgaccgttctcgaggacctgaagaacgtgttcccacctgaggtggccgtgttcgagcctagcgaggccgagatcagccacacccagaaagccaccctcgtgtgcctggctaccggcttctaccccgaccatgtggaactgtcttggtgggtcaacggcaaagaggtgcacagcggcgtgtctaccgacccccagccactgaaagaacagcccgccctgaacgacagccggtactgcctgagcagcagactgagagtgtccgccaccttctggcagaacccccggaaccacttcagatgccaggtgcagttctacggcctgagcgagaacgacgagtggacccaggacagagccaagcccgtgacccagatcgtgtctgccgaagcctggggcagagccgattgcggatcccagagcttcggcctgctggaccccaagctgtgctacctgctggatggcatcctgttcatctacggcgtgatcctgaccgccctgttcctgagagtgaagttcagcagaagcgccgacgcccctgcctaccagcagggacagaaccaactgtacaacgagctgaacctgggcagacgggaagagtacgacgtgctggacaagcggagaggcagggaccctgagatgggcggaaagccccagcggagaaagaacccccaggaaggactgttcaacgaactccagaaagacaagatggccgaagccttcagcgagatcggcatgaagggcgagcggagaagaggcaagggccacgatggcctgttccagggcctgagcaccgccaccaaggacaccttcgacgccctgcacatgcaggccctgcctccaagaagggccaagcgatctggatctggagcaacaaacttctcactactcaaacaagcaggtgacgtggaggagaatcccgggcctactagtatggactggatttggcgcatccttttccttgtcggcgctgctaccggcgcgcattccttcgaagcccagaccgtgacacagagccagcctgagatgtctgtgcaagaggccgagacagtgaccctgagctgcacctacgataccagcgagagcgactactacctgttctggtacaagcagcctcctagccggcagatgatcctggtcatccggcaagaagcctataagcagcagaacgccaccgagaacagattcagcgtgaacttccagaaggccgccaagagcttcagcctgaagatcagcgatagccagctgggcgacgccgccatgtacttttgcgcttatagaagcgccgtgaacgcccggctgatgtttggagatggcacacagctggtggtcaagcccaacacgcgtatccagaaccctgatcctgccgtgtaccagctgcgggatagcaagagcagcgacaagagcgtgtgtctgttcaccgacttcgacagccagaccaacgtgtcccagagcaaggactccgacgtgtacatcaccgataagaccgtgctggacatgcggagcatggacttcaagagcaactccgccgtggcctggtccaacaagtccgatttcgcctgcgccaacgccttcaacaacagcattatccccgaggacacattcttcccaagccccgagagcagctgcggtacccagagcttcggcctgctggaccccaagctgtgctacctgctggatggcatcctgttcatctacggcgtgatcctgaccgccctgttcctgagagtgaagttcagcagaagcgccgacgcccctgcctaccagcagggacagaaccaactgtacaacgagctgaacctgggcagacgggaagagtacgacgtgctggacaagcggagaggcagggaccctgagatgggcggaaagccccagcggagaaagaacccccaggaaggactgtataacgaactccagaaagacaagatggccgaagcctacagcgagatcggcatgaagggcgagcggagaagaggcaagggccacgatggcctgtaccagggcctgagcaccgccaccaaggacacctatgacgccctgcacatgcaggccctgcctccaagataa

SEQ ID NO: 9560 - DNA, 2595 bp, Artificial Sequence
  Synthetic Polynucleotide
atggccttaccagtgaccgccttgctcctgccgctggccttgctgctccacgccgccaggccggaattcgaagccgacatctaccagacacctagatacctggtcatcggcaccggcaagaaaatcaccctggaatgcagccagacaatgggccacgacaagatgtactggtatcagcaggaccccggcatggaactgcacctgatccactacagctacggcgtgaacagcaccgagaagggcgatctgtctagcgagagcaccgtgtccagaatcagaaccgagcacttcccactgacactggaaagcgccagacctagccacaccagccagtacctgtgtgcctcttctgaggccagaggactggccgagttcaccgacacacagtatttcggccctggcaccagactgaccgttctcgaggacctgaagaacgtgttcccacctgaggtggccgtgttcgagcctagcgaggccgagatcagccacacccagaaagccaccctcgtgtgcctggctaccggcttctaccccgaccatgtggaactgtcttggtgggtcaacggcaaagaggtgcacagcggcgtgtctaccgacccccagccactgaaagaacagcccgccctgaacgacagccggtactgcctgagcagcagactgagagtgtccgccaccttctggcagaacccccggaaccacttcagatgccaggtgcagttctacggcctgagcgagaacgacgagtggacccaggacagagccaagcccgtgacccagatcgtgtctgccgaagcctggggcagagccgattgcggatcccagagcttcggcctgctggaccccaagctgtgctacctgctggatggcatcctgttcatctacggcgtgatcctgaccgccctgttcctgagagtgaagttcagcagaagcgccgacgcccctgcctaccagcagggacagaaccaactgtacaacgagctgaacctgggcagacgggaagagtacgacgtgctggacaagcggagaggcagggaccctgagatgggcggaaagccccagcggagaaagaacccccaggaaggactgttcaacgaactccagaaagacaagatggccgaagccttcagcgagatcggcatgaagggcgagcggagaagaggcaagggccacgatggcctgttccagggcctgagcaccgccaccaaggacaccttcgacgccctgcacatgcaggccctgcctccaagaagggccaagcgatctggatctggagcaacaaacttctcactactcaaacaagcaggtgacgtggaggagaatcccgggcctactagtatggactggatttggcgcatccttttccttgtcggcgctgctaccggcgcgcattccttcgaagcccagaccgtgacacagagccagcctgagatgtctgtgcaagaggccgagacagtgaccctgagctgcacctacgataccagcgagagcgactactacctgttctggtacaagcagcctcctagccggcagatgatcctggtcatccggcaagaagcctataagcagcagaacgccaccgagaacagattcagcgtgaacttccagaaggccgccaagagcttcagcctgaagatcagcgatagccagctgggcgacgccgccatgtacttttgcgcttatagaagcgccgtgaacgcccggctgatgtttggagatggcacacagctggtggtcaagcccaacacgcgtatccagaaccctgatcctgccgtgtaccagctgcgggatagcaagagcagcgacaagagcgtgtgtctgttcaccgacttcgacagccagaccaacgtgtcccagagcaaggactccgacgtgtacatcaccgataagaccgtgctggacatgcggagcatggacttcaagagcaactccgccgtggcctggtccaacaagtccgatttcgcctgcgccaacgccttcaacaacagcattatccccgaggacacattcttcccaagccccgagagcagctgcggtacccagagcttcggcctgctggaccccaagctgtgctacctgctggatggcatcctgttcatctacggcgtgatcctgaccgccctgttcctgaaacggggcagaaagaaactcctgtatatattcaaacaaccatttatgagaccagtacaaactactcaagaggaagatggctgtagctgccgatttccagaagaagaagaaggaggatgtgaactgagagtgaagttcagcagaagcgccgacgcccctgcctaccagcagggacagaaccaactgtacaacgagctgaacctgggcagacgggaagagtacgacgtgctggacaagcggagaggcagggaccctgagatgggcggaaagccccagcggagaaagaacccccaggaaggactgtataacgaactccagaaagacaagatggccgaagcctacagcgagatcggcatgaagggcgagcggagaagaggcaagggccacgatggcctgtaccagggcctgagcaccgccaccaaggacacctatgacgccctgcacatgcaggccctgcctccaagataa

SEQ ID NO: 9561 - DNA, 2592 bp, Artificial Sequence
  Synthetic Polynucleotide
atggccttaccagtgaccgccttgctcctgccgctggccttgctgctccacgccgccaggccggaattcgaagccgacatctaccagacacctagatacctggtcatcggcaccggcaagaaaatcaccctggaatgcagccagacaatgggccacgacaagatgtactggtatcagcaggaccccggcatggaactgcacctgatccactacagctacggcgtgaacagcaccgagaagggcgatctgtctagcgagagcaccgtgtccagaatcagaaccgagcacttcccactgacactggaaagcgccagacctagccacaccagccagtacctgtgtgcctcttctgaggccagaggactggccgagttcaccgacacacagtatttcggccctggcaccagactgaccgttctcgaggacctgaagaacgtgttcccacctgaggtggccgtgttcgagcctagcgaggccgagatcagccacacccagaaagccaccctcgtgtgcctggctaccggcttctaccccgaccatgtggaactgtcttggtgggtcaacggcaaagaggtgcacagcggcgtgtctaccgacccccagccactgaaagaacagcccgccctgaacgacagccggtactgcctgagcagcagactgagagtgtccgccaccttctggcagaacccccggaaccacttcagatgccaggtgcagttctacggcctgagcgagaacgacgagtggacccaggacagagccaagcccgtgacccagatcgtgtctgccgaagcctggggcagagccgattgcggatcccagagcttcggcctgctggaccccaagctgtgctacctgctggatggcatcctgttcatctacggcgtgatcctgaccgccctgttcctgagagtgaagttcagcagaagcgccgacgcccctgcctaccagcagggacagaaccaactgtacaacgagctgaacctgggcagacgggaagagtacgacgtgctggacaagcggagaggcagggaccctgagatgggcggaaagccccagcggagaaagaacccccaggaaggactgttcaacgaactccagaaagacaagatggccgaagccttcagcgagatcggcatgaagggcgagcggagaagaggcaagggccacgatggcctgttccagggcctgagcaccgccaccaaggacaccttcgacgccctgcacatgcaggccctgcctccaagaagggccaagcgatctggatctggagcaacaaacttctcactactcaaacaagcaggtgacgtggaggagaatcccgggcctactagtatggactggatttggcgcatccttttccttgtcggcgctgctaccggcgcgcattccttcgaagcccagaccgtgacacagagccagcctgagatgtctgtgcaagaggccgagacagtgaccctgagctgcacctacgataccagcgagagcgactactacctgttctggtacaagcagcctcctagccggcagatgatcctggtcatccggcaagaagcctataagcagcagaacgccaccgagaacagattcagcgtgaacttccagaaggccgccaagagcttcagcctgaagatcagcgatagccagctgggcgacgccgccatgtacttttgcgcttatagaagcgccgtgaacgcccggctgatgtttggagatggcacacagctggtggtcaagcccaacacgcgtatccagaaccctgatcctgccgtgtaccagctgcgggatagcaagagcagcgacaagagcgtgtgtctgttcaccgacttcgacagccagaccaacgtgtcccagagcaaggactccgacgtgtacatcaccgataagaccgtgctggacatgcggagcatggacttcaagagcaactccgccgtggcctggtccaacaagtccgatttcgcctgcgccaacgccttcaacaacagcattatccccgaggacacattcttcccaagccccgagagcagctgcggtacccagagcttcggcctgctggaccccaagctgtgctacctgctggatggcatcctgttcatctacggcgtgatcctgaccgccctgttcctgaggagtaagaggagcaggctcctgcacagtgactacatgaacatgactccacgccgccccggacccacccgcaagcattaccagccctatgccccaccacgcgacttcgcagcctatcgctccagagtgaagttcagcagaagcgccgacgcccctgcctaccagcagggacagaaccaactgtacaacgagctgaacctgggcagacgggaagagtacgacgtgctggacaagcggagaggcagggaccctgagatgggcggaaagccccagcggagaaagaacccccaggaaggactgtataacgaactccagaaagacaagatggccgaagcctacagcgagatcggcatgaagggcgagcggagaagaggcaagggccacgatggcctgtaccagggcctgagcaccgccaccaaggacacctatgacgccctgcacatgcaggccctgcctccaagataa

SEQ ID NO: 9562 - DNA, 2577 bp, Artificial Sequence
  Synthetic Polynucleotide
atggccttaccagtgaccgccttgctcctgccgctggccttgctgctccacgccgccaggccggaattcgaagccgacatctaccagacacctagatacctggtcatcggcaccggcaagaaaatcaccctggaatgcagccagacaatgggccacgacaagatgtactggtatcagcaggaccccggcatggaactgcacctgatccactacagctacggcgtgaacagcaccgagaagggcgatctgtctagcgagagcaccgtgtccagaatcagaaccgagcacttcccactgacactggaaagcgccagacctagccacaccagccagtacctgtgtgcctcttctgaggccagaggactggccgagttcaccgacacacagtatttcggccctggcaccagactgaccgttctcgaggacctgaagaacgtgttcccacctgaggtggccgtgttcgagcctagcgaggccgagatcagccacacccagaaagccaccctcgtgtgcctggctaccggcttctaccccgaccatgtggaactgtcttggtgggtcaacggcaaagaggtgcacagcggcgtgtctaccgacccccagccactgaaagaacagcccgccctgaacgacagccggtactgcctgagcagcagactgagagtgtccgccaccttctggcagaacccccggaaccacttcagatgccaggtgcagttctacggcctgagcgagaacgacgagtggacccaggacagagccaagcccgtgacccagatcgtgtctgccgaagcctggggcagagccgattgcggatcccagagcttcggcctgctggaccccaagctgtgctacctgctggatggcatcctgttcatctacggcgtgatcctgaccgccctgttcctgagagtgaagttcagcagaagcgccgacgcccctgcctaccagcagggacagaaccaactgtacaacgagctgaacctgggcagacgggaagagtacgacgtgctggacaagcggagaggcagggaccctgagatgggcggaaagccccagcggagaaagaacccccaggaaggactgttcaacgaactccagaaagacaagatggccgaagccttcagcgagatcggcatgaagggcgagcggagaagaggcaagggccacgatggcctgttccagggcctgagcaccgccaccaaggacaccttcgacgccctgcacatgcaggccctgcctccaagaagggccaagcgatctggatctggagcaacaaacttctcactactcaaacaagcaggtgacgtggaggagaatcccgggcctactagtatggactggatttggcgcatccttttccttgtcggcgctgctaccggcgcgcattccttcgaagcccagaccgtgacacagagccagcctgagatgtctgtgcaagaggccgagacagtgaccctgagctgcacctacgataccagcgagagcgactactacctgttctggtacaagcagcctcctagccggcagatgatcctggtcatccggcaagaagcctataagcagcagaacgccaccgagaacagattcagcgtgaacttccagaaggccgccaagagcttcagcctgaagatcagcgatagccagctgggcgacgccgccatgtacttttgcgcttatagaagcgccgtgaacgcccggctgatgtttggagatggcacacagctggtggtcaagcccaacacgcgtatccagaaccctgatcctgccgtgtaccagctgcgggatagcaagagcagcgacaagagcgtgtgtctgttcaccgacttcgacagccagaccaacgtgtcccagagcaaggactccgacgtgtacatcaccgataagaccgtgctggacatgcggagcatggacttcaagagcaactccgccgtggcctggtccaacaagtccgatttcgcctgcgccaacgccttcaacaacagcattatccccgaggacacattcttcccaagccccgagagcagctgcggtacccagagcttcggcctgctggaccccaagctgtgctacctgctggatggcatcctgttcatctacggcgtgatcctgaccgccctgttcctgagggaccaaagactgcctcctgacgctcacaaacctccaggcggaggcagcttcagaacccctatccaagaggaacaggctgacgcccacagcaccctggcaaaaattagagtgaagttcagcagaagcgccgacgcccctgcctaccagcagggacagaaccaactgtacaacgagctgaacctgggcagacgggaagagtacgacgtgctggacaagcggagaggcagggaccctgagatgggcggaaagccccagcggagaaagaacccccaggaaggactgtataacgaactccagaaagacaagatggccgaagcctacagcgagatcggcatgaagggcgagcggagaagaggcaagggccacgatggcctgtaccagggcctgagcaccgccaccaaggacacctatgacgccctgcacatgcaggccctgcctccaagataa

SEQ ID NO: 9563 - DNA, 2829 bp, Artificial Sequence
  Synthetic Polynucleotide
atggccttaccagtgaccgccttgctcctgccgctggccttgctgctccacgccgccaggccggaattcgaagccgacatctaccagacacctagatacctggtcatcggcaccggcaagaaaatcaccctggaatgcagccagacaatgggccacgacaagatgtactggtatcagcaggaccccggcatggaactgcacctgatccactacagctacggcgtgaacagcaccgagaagggcgatctgtctagcgagagcaccgtgtccagaatcagaaccgagcacttcccactgacactggaaagcgccagacctagccacaccagccagtacctgtgtgcctcttctgaggccagaggactggccgagttcaccgacacacagtatttcggccctggcaccagactgaccgttctcgaggacctgaagaacgtgttcccacctgaggtggccgtgttcgagcctagcgaggccgagatcagccacacccagaaagccaccctcgtgtgcctggctaccggcttctaccccgaccatgtggaactgtcttggtgggtcaacggcaaagaggtgcacagcggcgtgtctaccgacccccagccactgaaagaacagcccgccctgaacgacagccggtactgcctgagcagcagactgagagtgtccgccaccttctggcagaacccccggaaccacttcagatgccaggtgcagttctacggcctgagcgagaacgacgagtggacccaggacagagccaagcccgtgacccagatcgtgtctgccgaagcctggggcagagccgattgcggatcccagagcttcggcctgctggaccccaagctgtgctacctgctggatggcatcctgttcatctacggcgtgatcctgaccgccctgttcctgagagtgaagttcagcagaagcgccgacgcccctgcctaccagcagggacagaaccaactgtacaacgagctgaacctgggcagacgggaagagtacgacgtgctggacaagcggagaggcagggaccctgagatgggcggaaagccccagcggagaaagaacccccaggaaggactgttcaacgaactccagaaagacaagatggccgaagccttcagcgagatcggcatgaagggcgagcggagaagaggcaagggccacgatggcctgttccagggcctgagcaccgccaccaaggacaccttcgacgccctgcacatgcaggccctgcctccaagaagggccaagcgatctggatctggagcaacaaacttctcactactcaaacaagcaggtgacgtggaggagaatcccgggcctactagtatggactggatttggcgcatccttttccttgtcggcgctgctaccggcgcgcattccttcgaagcccagaccgtgacacagagccagcctgagatgtctgtgcaagaggccgagacagtgaccctgagctgcacctacgataccagcgagagcgactactacctgttctggtacaagcagcctcctagccggcagatgatcctggtcatccggcaagaagcctataagcagcagaacgccaccgagaacagattcagcgtgaacttccagaaggccgccaagagcttcagcctgaagatcagcgatagccagctgggcgacgccgccatgtacttttgcgcttatagaagcgccgtgaacgcccggctgatgtttggagatggcacacagctggtggtcaagcccaacacgcgtatccagaaccctgatcctgccgtgtaccagctgcgggatagcaagagcagcgacaagagcgtgtgtctgttcaccgacttcgacagccagaccaacgtgtcccagagcaaggactccgacgtgtacatcaccgataagaccgtgctggacatgcggagcatggacttcaagagcaactccgccgtggcctggtccaacaagtccgatttcgcctgcgccaacgccttcaacaacagcattatccccgaggacacattcttcccaagccccgagagcagctgcggtacccagagcttcggcctgctggaccccaagctgtgctacctgctggatggcatcctgttcatctacggcgtgatcctgaccgccctgttcctgtggcggcggaagcggaaagagaagcagtctgagacaagccccaaagagttcctgaccatctacgaggacgtgaaggacctgaaaacccggcggaaccacgaacaagagcagacctttcctggcggaggcagcaccatctacagcatgatccagagccagagcagcgcccctacaagccaagagcctgcctacacactgtactccctgatccagcctagcagaaagagcggcagccggaagagaaatcacagccccagcttcaacagcacgatctacgaagtgatcggcaagagccagccaaaggctcagaaccctgccagactgagccggaaagagctggaaaacttcgacgtgtacagcagagtgaagttcagcagaagcgccgacgcccctgcctaccagcagggacagaaccaactgtacaacgagctgaacctgggcagacgggaagagtacgacgtgctggacaagcggagaggcagggaccctgagatgggcggaaagccccagcggagaaagaacccccaggaaggactgtataacgaactccagaaagacaagatggccgaagcctacagcgagatcggcatgaagggcgagcggagaagaggcaagggccacgatggcctgtaccagggcctgagcaccgccaccaaggacacctatgacgccctgcacatgcaggccctgcctccaagataa

SEQ ID NO: 9564 - DNA, 2592 bp, Artificial Sequence
  Synthetic Polynucleotide
atggccttaccagtgaccgccttgctcctgccgctggccttgctgctccacgccgccaggccggaattcgaagccgacatctaccagacacctagatacctggtcatcggcaccggcaagaaaatcaccctggaatgcagccagacaatgggccacgacaagatgtactggtatcagcaggaccccggcatggaactgcacctgatccactacagctacggcgtgaacagcaccgagaagggcgatctgtctagcgagagcaccgtgtccagaatcagaaccgagcacttcccactgacactggaaagcgccagacctagccacaccagccagtacctgtgtgcctcttctgaggccagaggactggccgagttcaccgacacacagtatttcggccctggcaccagactgaccgttctcgaggacctgaagaacgtgttcccacctgaggtggccgtgttcgagcctagcgaggccgagatcagccacacccagaaagccaccctcgtgtgcctggctaccggcttctaccccgaccatgtggaactgtcttggtgggtcaacggcaaagaggtgcacagcggcgtgtctaccgacccccagccactgaaagaacagcccgccctgaacgacagccggtactgcctgagcagcagactgagagtgtccgccaccttctggcagaacccccggaaccacttcagatgccaggtgcagttctacggcctgagcgagaacgacgagtggacccaggacagagccaagcccgtgacccagatcgtgtctgccgaagcctggggcagagccgattgcggatcccagagcttcggcctgctggaccccaagctgtgctacctgctggatggcatcctgttcatctacggcgtgatcctgaccgccctgttcctgagagtgaagttcagcagaagcgccgacgcccctgcctaccagcagggacagaaccaactgtacaacgagctgaacctgggcagacgggaagagtacgacgtgctggacaagcggagaggcagggaccctgagatgggcggaaagccccagcggagaaagaacccccaggaaggactgttcaacgaactccagaaagacaagatggccgaagccttcagcgagatcggcatgaagggcgagcggagaagaggcaagggccacgatggcctgttccagggcctgagcaccgccaccaaggacaccttcgacgccctgcacatgcaggccctgcctccaagaagggccaagcgatctggatctggagcaacaaacttctcactactcaaacaagcaggtgacgtggaggagaatcccgggcctactagtatggactggatttggcgcatccttttccttgtcggcgctgctaccggcgcgcattccttcgaagcccagaccgtgacacagagccagcctgagatgtctgtgcaagaggccgagacagtgaccctgagctgcacctacgataccagcgagagcgactactacctgttctggtacaagcagcctcctagccggcagatgatcctggtcatccggcaagaagcctataagcagcagaacgccaccgagaacagattcagcgtgaacttccagaaggccgccaagagcttcagcctgaagatcagcgatagccagctgggcgacgccgccatgtacttttgcgcttatagaagcgccgtgaacgcccggctgatgtttggagatggcacacagctggtggtcaagcccaacacgcgtatccagaaccctgatcctgccgtgtaccagctgcgggatagcaagagcagcgacaagagcgtgtgtctgttcaccgacttcgacagccagaccaacgtgtcccagagcaaggactccgacgtgtacatcaccgataagaccgtgctggacatgcggagcatggacttcaagagcaactccgccgtggcctggtccaacaagtccgatttcgcctgcgccaacgccttcaacaacagcattatccccgaggacacattcttcccaagccccgagagcagctgcggtacccagagttttgggttgttggaccctaaattgtgctatctgttggacggaatcctgttcatttacggagtgatcctgaccgcattgttcctgaggagcaagcggtcacggctgctccacagcgattacatgaatatgacaccacgaagaccgggtcctactcgcaaacactaccaaccctacgcacctccccgcgactttgcagcgtaccgatctcgggttaagttttccagatccgcagacgcacccgcttaccaacaagggcagaaccaactctacaatgaacttaatttggggcggagggaagagtacgacgttctggacaaaaggaggggacgagatcccgagatgggcggaaagcctcagcgaaggaagaatccgcaagaggggctttataacgaactccagaaagataaaatggcagaagcctatagtgagattgggatgaagggagaaaggaggaggggtaaaggtcacgatgggttgtaccaaggattgagcacagccactaaagatacctatgatgcgctccacatgcaggccctgccgccaagataa

SEQ ID NO: 9565 - DNA, 2595 bp, Artificial Sequence
  Synthetic Polynucleotide
atggccttaccagtgaccgccttgctcctgccgctggccttgctgctccacgccgccaggccggaattcgaagccgacatctaccagacacctagatacctggtcatcggcaccggcaagaaaatcaccctggaatgcagccagacaatgggccacgacaagatgtactggtatcagcaggaccccggcatggaactgcacctgatccactacagctacggcgtgaacagcaccgagaagggcgatctgtctagcgagagcaccgtgtccagaatcagaaccgagcacttcccactgacactggaaagcgccagacctagccacaccagccagtacctgtgtgcctcttctgaggccagaggactggccgagttcaccgacacacagtatttcggccctggcaccagactgaccgttctcgaggacctgaagaacgtgttcccacctgaggtggccgtgttcgagcctagcgaggccgagatcagccacacccagaaagccaccctcgtgtgcctggctaccggcttctaccccgaccatgtggaactgtcttggtgggtcaacggcaaagaggtgcacagcggcgtgtctaccgacccccagccactgaaagaacagcccgccctgaacgacagccggtactgcctgagcagcagactgagagtgtccgccaccttctggcagaacccccggaaccacttcagatgccaggtgcagttctacggcctgagcgagaacgacgagtggacccaggacagagccaagcccgtgacccagatcgtgtctgccgaagcctggggcagagccgattgcggatcccagagcttcggcctgctggaccccaagctgtgctacctgctggatggcatcctgttcatctacggcgtgatcctgaccgccctgttcctgagagtgaagttcagcagaagcgccgacgcccctgcctaccagcagggacagaaccaactgtacaacgagctgaacctgggcagacgggaagagtacgacgtgctggacaagcggagaggcagggaccctgagatgggcggaaagccccagcggagaaagaacccccaggaaggactgttcaacgaactccagaaagacaagatggccgaagccttcagcgagatcggcatgaagggcgagcggagaagaggcaagggccacgatggcctgttccagggcctgagcaccgccaccaaggacaccttcgacgccctgcacatgcaggccctgcctccaagaagggccaagcgatctggatctggagcaacaaacttctcactactcaaacaagcaggtgacgtggaggagaatcccgggcctactagtatggactggatttggcgcatccttttccttgtcggcgctgctaccggcgcgcattccttcgaagcccagaccgtgacacagagccagcctgagatgtctgtgcaagaggccgagacagtgaccctgagctgcacctacgataccagcgagagcgactactacctgttctggtacaagcagcctcctagccggcagatgatcctggtcatccggcaagaagcctataagcagcagaacgccaccgagaacagattcagcgtgaacttccagaaggccgccaagagcttcagcctgaagatcagcgatagccagctgggcgacgccgccatgtacttttgcgcttatagaagcgccgtgaacgcccggctgatgtttggagatggcacacagctggtggtcaagcccaacacgcgtatccagaaccctgatcctgccgtgtaccagctgcgggatagcaagagcagcgacaagagcgtgtgtctgttcaccgacttcgacagccagaccaacgtgtcccagagcaaggactccgacgtgtacatcaccgataagaccgtgctggacatgcggagcatggacttcaagagcaactccgccgtggcctggtccaacaagtccgatttcgcctgcgccaacgccttcaacaacagcattatccccgaggacacattcttcccaagccccgagagcagctgcggtacccagagttttgggttgttggaccctaaattgtgctatctgttggacggaatcctgttcatttacggagtgatcctgaccgcattgttcctgaagagaggccggaagaagctgctgtacatcttcaagcagcctttcatgcggcccgtgcagaccacccaggaagaggacggctgctcctgccggttccccgaggaagaagaaggcggctgcgagctgcgggttaagttttccagatccgcagacgcacccgcttaccaacaagggcagaaccaactctacaatgaacttaatttggggcggagggaagagtacgacgttctggacaaaaggaggggacgagatcccgagatgggcggaaagcctcagcgaaggaagaatccgcaagaggggctttataacgaactccagaaagataaaatggcagaagcctatagtgagattgggatgaagggagaaaggaggaggggtaaaggtcacgatgggttgtaccaaggattgagcacagccactaaagatacctatgatgcgctccacatgcaggccctgccgccaagataa

SEQ ID NO: 9566 - DNA, 2469 bp, Artificial Sequence
  Synthetic Polynucleotide
atggccttaccagtgaccgccttgctcctgccgctggccttgctgctccacgccgccaggccggaattcgaagccgacatctaccagacacctagatacctggtcatcggcaccggcaagaaaatcaccctggaatgcagccagacaatgggccacgacaagatgtactggtatcagcaggaccccggcatggaactgcacctgatccactacagctacggcgtgaacagcaccgagaagggcgatctgtctagcgagagcaccgtgtccagaatcagaaccgagcacttcccactgacactggaaagcgccagacctagccacaccagccagtacctgtgtgcctcttctgaggccagaggactggccgagttcaccgacacacagtatttcggccctggcaccagactgaccgttctcgaggacctgaagaacgtgttcccacctgaggtggccgtgttcgagcctagcgaggccgagatcagccacacccagaaagccaccctcgtgtgcctggctaccggcttctaccccgaccatgtggaactgtcttggtgggtcaacggcaaagaggtgcacagcggcgtgtctaccgacccccagccactgaaagaacagcccgccctgaacgacagccggtactgcctgagcagcagactgagagtgtccgccaccttctggcagaacccccggaaccacttcagatgccaggtgcagttctacggcctgagcgagaacgacgagtggacccaggacagagccaagcccgtgacccagatcgtgtctgccgaagcctggggcagagccgattgcggatcccagagcttcggcctgctggaccccaagctgtgctacctgctggatggcatcctgttcatctacggcgtgatcctgaccgccctgttcctgagagtgaagttcagcagaagcgccgacgcccctgcctaccagcagggacagaaccaactgtacaacgagctgaacctgggcagacgggaagagtacgacgtgctggacaagcggagaggcagggaccctgagatgggcggaaagccccagcggagaaagaacccccaggaaggactgttcaacgaactccagaaagacaagatggccgaagccttcagcgagatcggcatgaagggcgagcggagaagaggcaagggccacgatggcctgttccagggcctgagcaccgccaccaaggacaccttcgacgccctgcacatgcaggccctgcctccaagaagggccaagcgatctggatctggagcaacaaacttctcactactcaaacaagcaggtgacgtggaggagaatcccgggcctactagtatggactggatttggcgcatccttttccttgtcggcgctgctaccggcgcgcattccttcgaagcccagaccgtgacacagagccagcctgagatgtctgtgcaagaggccgagacagtgaccctgagctgcacctacgataccagcgagagcgactactacctgttctggtacaagcagcctcctagccggcagatgatcctggtcatccggcaagaagcctataagcagcagaacgccaccgagaacagattcagcgtgaacttccagaaggccgccaagagcttcagcctgaagatcagcgatagccagctgggcgacgccgccatgtacttttgcgcttatagaagcgccgtgaacgcccggctgatgtttggagatggcacacagctggtggtcaagcccaacacgcgtatccagaaccctgatcctgccgtgtaccagctgcgggatagcaagagcagcgacaagagcgtgtgtctgttcaccgacttcgacagccagaccaacgtgtcccagagcaaggactccgacgtgtacatcaccgataagaccgtgctggacatgcggagcatggacttcaagagcaactccgccgtggcctggtccaacaagtccgatttcgcctgcgccaacgccttcaacaacagcattatccccgaggacacattcttcccaagccccgagagcagctgcggtacccagagcttcggcctgctggaccccaagctgagctacctgctggatggcatcctgttcatctacggcgtgatcctgaccgccctgttcctgagagtgaagttcagcagaagcgccgacgcccctgcctaccagcagggacagaaccaactgtacaacgagctgaacctgggcagacgggaagagtacgacgtgctggacaagcggagaggcagggaccctgagatgggcggaaagccccagcggagaaagaacccccaggaaggactgtataacgaactccagaaagacaagatggccgaagcctacagcgagatcggcatgaagggcgagcggagaagaggcaagggccacgatggcctgtaccagggcctgagcaccgccaccaaggacacctatgacgccctgcacatgcaggccctgcctccaagataa

SEQ ID NO: 9567 - DNA, 2469 bp, Artificial Sequence
  Synthetic Polynucleotide
atggccttaccagtgaccgccttgctcctgccgctggccttgctgctccacgccgccaggccggaattcgaagccgacatctaccagacacctagatacctggtcatcggcaccggcaagaaaatcaccctggaatgcagccagacaatgggccacgacaagatgtactggtatcagcaggaccccggcatggaactgcacctgatccactacagctacggcgtgaacagcaccgagaagggcgatctgtctagcgagagcaccgtgtccagaatcagaaccgagcacttcccactgacactggaaagcgccagacctagccacaccagccagtacctgtgtgcctcttctgaggccagaggactggccgagttcaccgacacacagtatttcggccctggcaccagactgaccgttctcgaggacctgaagaacgtgttcccacctgaggtggccgtgttcgagcctagcgaggccgagatcagccacacccagaaagccaccctcgtgtgcctggctaccggcttctaccccgaccatgtggaactgtcttggtgggtcaacggcaaagaggtgcacagcggcgtgtctaccgacccccagccactgaaagaacagcccgccctgaacgacagccggtactgcctgagcagcagactgagagtgtccgccaccttctggcagaacccccggaaccacttcagatgccaggtgcagttctacggcctgagcgagaacgacgagtggacccaggacagagccaagcccgtgacccagatcgtgtctgccgaagcctggggcagagccgattgcggatcccagagcttcggcctgctggaccccaagctgtgctacctgctggatggcatcctgttcatctacggcgtgatcctgaccgccctgttcctgagagtgaagttcagcagaagcgccgacgcccctgcctaccagcagggacagaaccaactgtacaacgagctgaacctgggcagacgggaagagtacgacgtgctggacaagcggagaggcagggaccctgagatgggcggaaagccccagcggagaaagaacccccaggaaggactgttcaacgaactccagaaagacaagatggccgaagccttcagcgagatcggcatgaagggcgagcggagaagaggcaagggccacgatggcctgttccagggcctgagcaccgccaccaaggacaccttcgacgccctgcacatgcaggccctgcctccaagaagggccaagcgatctggatctggagcaacaaacttctcactactcaaacaagcaggtgacgtggaggagaatcccgggcctactagtatggactggatttggcgcatccttttccttgtcggcgctgctaccggcgcgcattccttcgaagcccagaccgtgacacagagccagcctgagatgtctgtgcaagaggccgagacagtgaccctgagctgcacctacgataccagcgagagcgactactacctgttctggtacaagcagcctcctagccggcagatgatcctggtcatccggcaagaagcctataagcagcagaacgccaccgagaacagattcagcgtgaacttccagaaggccgccaagagcttcagcctgaagatcagcgatagccagctgggcgacgccgccatgtacttttgcgcttatagaagcgccgtgaacgcccggctgatgtttggagatggcacacagctggtggtcaagcccaacacgcgtatccagaaccctgatcctgccgtgtaccagctgcgggatagcaagagcagcgacaagagcgtgtgtctgttcaccgacttcgacagccagaccaacgtgtcccagagcaaggactccgacgtgtacatcaccgataagaccgtgctggacatgcggagcatggacttcaagagcaactccgccgtggcctggtccaacaagtccgatttcgcctgcgccaacgccttcaacaacagcattatccccgaggacacattcttcccaagccccgagagcagctgcggtacccagagttttgggttgttggaccctaaattgagctatctgttggacggaatcctgttcatttacggagtgatcctgaccgcattgttcctgcgggttaagttttccagatccgcagacgcacccgcttaccaacaagggcagaaccaactctacaatgaacttaatttggggcggagggaagagtacgacgttctggacaaaaggaggggacgagatcccgagatgggcggaaagcctcagcgaaggaagaatccgcaagaggggctttataacgaactccagaaagataaaatggcagaagcctatagtgagattgggatgaagggagaaaggaggaggggtaaaggtcacgatgggttgtaccaaggattgagcacagccactaaagatacctatgatgcgctccacatgcaggccctgccgccaagataa

SEQ ID NO: 9568 - DNA, 2469 bp, Artificial Sequence
  Synthetic Polynucleotide
atggccttaccagtgaccgccttgctcctgccgctggccttgctgctccacgccgccaggccggaattcgaagccgacatctaccagacacctagatacctggtcatcggcaccggcaagaaaatcaccctggaatgcagccagacaatgggccacgacaagatgtactggtatcagcaggaccccggcatggaactgcacctgatccactacagctacggcgtgaacagcaccgagaagggcgatctgtctagcgagagcaccgtgtccagaatcagaaccgagcacttcccactgacactggaaagcgccagacctagccacaccagccagtacctgtgtgcctcttctgaggccagaggactggccgagttcaccgacacacagtatttcggccctggcaccagactgaccgttctcgaggacctgaagaacgtgttcccacctgaggtggccgtgttcgagcctagcgaggccgagatcagccacacccagaaagccaccctcgtgtgcctggctaccggcttctaccccgaccatgtggaactgtcttggtgggtcaacggcaaagaggtgcacagcggcgtgtctaccgacccccagccactgaaagaacagcccgccctgaacgacagccggtactgcctgagcagcagactgagagtgtccgccaccttctggcagaacccccggaaccacttcagatgccaggtgcagttctacggcctgagcgagaacgacgagtggacccaggacagagccaagcccgtgacccagatcgtgtctgccgaagcctggggcagagccgattgcggatcccagagcttcggcctgctggaccccaagctgagctacctgctggatggcatcctgttcatctacggcgtgatcctgaccgccctgttcctgagagtgaagttcagcagaagcgccgacgcccctgcctaccagcagggacagaaccaactgtacaacgagctgaacctgggcagacgggaagagtacgacgtgctggacaagcggagaggcagggaccctgagatgggcggaaagccccagcggagaaagaacccccaggaaggactgtataacgaactccagaaagacaagatggccgaagcctacagcgagatcggcatgaagggcgagcggagaagaggcaagggccacgatggcctgtaccagggcctgagcaccgccaccaaggacacctatgacgccctgcacatgcaggccctgcctccaagaagggccaagcgatctggatctggagcaacaaacttctcactactcaaacaagcaggtgacgtggaggagaatcccgggcctactagtatggactggatttggcgcatccttttccttgtcggcgctgctaccggcgcgcattccttcgaagcccagaccgtgacacagagccagcctgagatgtctgtgcaagaggccgagacagtgaccctgagctgcacctacgataccagcgagagcgactactacctgttctggtacaagcagcctcctagccggcagatgatcctggtcatccggcaagaagcctataagcagcagaacgccaccgagaacagattcagcgtgaacttccagaaggccgccaagagcttcagcctgaagatcagcgatagccagctgggcgacgccgccatgtacttttgcgcttatagaagcgccgtgaacgcccggctgatgtttggagatggcacacagctggtggtcaagcccaacacgcgtatccagaaccctgatcctgccgtgtaccagctgcgggatagcaagagcagcgacaagagcgtgtgtctgttcaccgacttcgacagccagaccaacgtgtcccagagcaaggactccgacgtgtacatcaccgataagaccgtgctggacatgcggagcatggacttcaagagcaactccgccgtggcctggtccaacaagtccgatttcgcctgcgccaacgccttcaacaacagcattatccccgaggacacattcttcccaagccccgagagcagctgcggtacccagagttttgggttgttggaccctaaattgagctatctgttggacggaatcctgttcatttacggagtgatcctgaccgcattgttcctgcgggttaagttttccagatccgcagacgcacccgcttaccaacaagggcagaaccaactctacaatgaacttaatttggggcggagggaagagtacgacgttctggacaaaaggaggggacgagatcccgagatgggcggaaagcctcagcgaaggaagaatccgcaagaggggctttataacgaactccagaaagataaaatggcagaagcctatagtgagattgggatgaagggagaaaggaggaggggtaaaggtcacgatgggttgtaccaaggattgagcacagccactaaagatacctatgatgcgctccacatgcaggccctgccgccaagataa

SEQ ID NO: 9569 - DNA, 2181 bp, Artificial Sequence
  Synthetic Polynucleotide
atggccttaccagtgaccgccttgctcctgccgctggccttgctgctccacgccgccaggccggaattcgaagccgacatctaccagacacctagatacctggtcatcggcaccggcaagaaaatcaccctggaatgcagccagacaatgggccacgacaagatgtactggtatcagcaggaccccggcatggaactgcacctgatccactacagctacggcgtgaacagcaccgagaagggcgatctgtctagcgagagcaccgtgtccagaatcagaaccgagcacttcccactgacactggaaagcgccagacctagccacaccagccagtacctgtgtgcctcttctgaggccagaggactggccgagttcaccgacacacagtatttcggccctggcaccagactgaccgttctcgaggacctgaagaacgtgttcccacctgaggtggccgtgttcgagcctagcgaggccgagatcagccacacccagaaagccaccctcgtgtgcctggctaccggcttctaccccgaccatgtggaactgtcttggtgggtcaacggcaaagaggtgcacagcggcgtgtctaccgacccccagccactgaaagaacagcccgccctgaacgacagccggtactgcctgagcagcagactgagagtgtccgccaccttctggcagaacccccggaaccacttcagatgccaggtgcagttctacggcctgagcgagaacgacgagtggacccaggacagagccaagcccgtgacccagatcgtgtctgccgaagcctggggcagagccgattgcggatccacaacacctggcgagagaagtagcctgcctgccttctatcctggcaccagcggctcttgttctggctgtggatctctgagcctgcctctgctggctggactggttgctgctgatgctgtggcctctctgctgattgtgggagccgtgttcctgtgcgccagacctagaagaagccccgctcaagaggacggcaaggtgtacatcaacatgcccggcagaggaagggccaagcgatctggatctggagcaacaaacttctcactactcaaacaagcaggtgacgtggaggagaatcccgggcctactagtatggactggatttggcgcatccttttccttgtcggcgctgctaccggcgcgcattccttcgaagcccagaccgtgacacagagccagcctgagatgtctgtgcaagaggccgagacagtgaccctgagctgcacctacgataccagcgagagcgactactacctgttctggtacaagcagcctcctagccggcagatgatcctggtcatccggcaagaagcctataagcagcagaacgccaccgagaacagattcagcgtgaacttccagaaggccgccaagagcttcagcctgaagatcagcgatagccagctgggcgacgccgccatgtacttttgcgcttatagaagcgccgtgaacgcccggctgatgtttggagatggcacacagctggtggtcaagcccaacacgcgtatccagaaccctgatcctgccgtgtaccagctgcgggatagcaagagcagcgacaagagcgtgtgtctgttcaccgacttcgacagccagaccaacgtgtcccagagcaaggactccgacgtgtacatcaccgataagaccgtgctggacatgcggagcatggacttcaagagcaactccgccgtggcctggtccaacaagtccgatttcgcctgcgccaacgccttcaacaacagcattatccccgaggacacattcttcccaagccccgagagcagctgcggtaccacaacacctggcgagagaagtagcctgcctgccttctatcctggcaccagcggctcttgttctggctgtggatctctgagcctgcctctgctggctggactggttgctgctgatgctgtggcctctctgctgattgtgggagccgtgttcaaacggggcagaaagaaactcctgtatatattcaaacaaccatttatgagaccagtacaaactactcaagaggaagatggctgtagctgccgatttccagaagaagaagaaggaggatgtgaactgctgtgcgccagacctagaagaagccccgctcaagaggacggcaaggtgtacatcaacatgcccggcagaggataa

SEQ ID NO: 9570 - DNA, 2178 bp, Artificial Sequence
  Synthetic Polynucleotide
atggccttaccagtgaccgccttgctcctgccgctggccttgctgctccacgccgccaggccggaattcgaagccgacatctaccagacacctagatacctggtcatcggcaccggcaagaaaatcaccctggaatgcagccagacaatgggccacgacaagatgtactggtatcagcaggaccccggcatggaactgcacctgatccactacagctacggcgtgaacagcaccgagaagggcgatctgtctagcgagagcaccgtgtccagaatcagaaccgagcacttcccactgacactggaaagcgccagacctagccacaccagccagtacctgtgtgcctcttctgaggccagaggactggccgagttcaccgacacacagtatttcggccctggcaccagactgaccgttctcgaggacctgaagaacgtgttcccacctgaggtggccgtgttcgagcctagcgaggccgagatcagccacacccagaaagccaccctcgtgtgcctggctaccggcttctaccccgaccatgtggaactgtcttggtgggtcaacggcaaagaggtgcacagcggcgtgtctaccgacccccagccactgaaagaacagcccgccctgaacgacagccggtactgcctgagcagcagactgagagtgtccgccaccttctggcagaacccccggaaccacttcagatgccaggtgcagttctacggcctgagcgagaacgacgagtggacccaggacagagccaagcccgtgacccagatcgtgtctgccgaagcctggggcagagccgattgcggatccacaacacctggcgagagaagtagcctgcctgccttctatcctggcaccagcggctcttgttctggctgtggatctctgagcctgcctctgctggctggactggttgctgctgatgctgtggcctctctgctgattgtgggagccgtgttcctgtgcgccagacctagaagaagccccgctcaagaggacggcaaggtgtacatcaacatgcccggcagaggaagggccaagcgatctggatctggagcaacaaacttctcactactcaaacaagcaggtgacgtggaggagaatcccgggcctactagtatggactggatttggcgcatccttttccttgtcggcgctgctaccggcgcgcattccttcgaagcccagaccgtgacacagagccagcctgagatgtctgtgcaagaggccgagacagtgaccctgagctgcacctacgataccagcgagagcgactactacctgttctggtacaagcagcctcctagccggcagatgatcctggtcatccggcaagaagcctataagcagcagaacgccaccgagaacagattcagcgtgaacttccagaaggccgccaagagcttcagcctgaagatcagcgatagccagctgggcgacgccgccatgtacttttgcgcttatagaagcgccgtgaacgcccggctgatgtttggagatggcacacagctggtggtcaagcccaacacgcgtatccagaaccctgatcctgccgtgtaccagctgcgggatagcaagagcagcgacaagagcgtgtgtctgttcaccgacttcgacagccagaccaacgtgtcccagagcaaggactccgacgtgtacatcaccgataagaccgtgctggacatgcggagcatggacttcaagagcaactccgccgtggcctggtccaacaagtccgatttcgcctgcgccaacgccttcaacaacagcattatccccgaggacacattcttcccaagccccgagagcagctgcggtaccacaacacctggcgagagaagtagcctgcctgccttctatcctggcaccagcggctcttgttctggctgtggatctctgagcctgcctctgctggctggactggttgctgctgatgctgtggcctctctgctgattgtgggagccgtgttcaggagtaagaggagcaggctcctgcacagtgactacatgaacatgactccacgccgccccggacccacccgcaagcattaccagccctatgccccaccacgcgacttcgcagcctatcgctccctgtgcgccagacctagaagaagccccgctcaagaggacggcaaggtgtacatcaacatgcccggcagaggataa

SEQ ID NO: 9571 - DNA, 2163 bp, Artificial Sequence
  Synthetic Polynucleotide
atggccttaccagtgaccgccttgctcctgccgctggccttgctgctccacgccgccaggccggaattcgaagccgacatctaccagacacctagatacctggtcatcggcaccggcaagaaaatcaccctggaatgcagccagacaatgggccacgacaagatgtactggtatcagcaggaccccggcatggaactgcacctgatccactacagctacggcgtgaacagcaccgagaagggcgatctgtctagcgagagcaccgtgtccagaatcagaaccgagcacttcccactgacactggaaagcgccagacctagccacaccagccagtacctgtgtgcctcttctgaggccagaggactggccgagttcaccgacacacagtatttcggccctggcaccagactgaccgttctcgaggacctgaagaacgtgttcccacctgaggtggccgtgttcgagcctagcgaggccgagatcagccacacccagaaagccaccctcgtgtgcctggctaccggcttctaccccgaccatgtggaactgtcttggtgggtcaacggcaaagaggtgcacagcggcgtgtctaccgacccccagccactgaaagaacagcccgccctgaacgacagccggtactgcctgagcagcagactgagagtgtccgccaccttctggcagaacccccggaaccacttcagatgccaggtgcagttctacggcctgagcgagaacgacgagtggacccaggacagagccaagcccgtgacccagatcgtgtctgccgaagcctggggcagagccgattgcggatccacaacacctggcgagagaagtagcctgcctgccttctatcctggcaccagcggctcttgttctggctgtggatctctgagcctgcctctgctggctggactggttgctgctgatgctgtggcctctctgctgattgtgggagccgtgttcctgtgcgccagacctagaagaagccccgctcaagaggacggcaaggtgtacatcaacatgcccggcagaggaagggccaagcgatctggatctggagcaacaaacttctcactactcaaacaagcaggtgacgtggaggagaatcccgggcctactagtatggactggatttggcgcatccttttccttgtcggcgctgctaccggcgcgcattccttcgaagcccagaccgtgacacagagccagcctgagatgtctgtgcaagaggccgagacagtgaccctgagctgcacctacgataccagcgagagcgactactacctgttctggtacaagcagcctcctagccggcagatgatcctggtcatccggcaagaagcctataagcagcagaacgccaccgagaacagattcagcgtgaacttccagaaggccgccaagagcttcagcctgaagatcagcgatagccagctgggcgacgccgccatgtacttttgcgcttatagaagcgccgtgaacgcccggctgatgtttggagatggcacacagctggtggtcaagcccaacacgcgtatccagaaccctgatcctgccgtgtaccagctgcgggatagcaagagcagcgacaagagcgtgtgtctgttcaccgacttcgacagccagaccaacgtgtcccagagcaaggactccgacgtgtacatcaccgataagaccgtgctggacatgcggagcatggacttcaagagcaactccgccgtggcctggtccaacaagtccgatttcgcctgcgccaacgccttcaacaacagcattatccccgaggacacattcttcccaagccccgagagcagctgcggtaccacaacacctggcgagagaagtagcctgcctgccttctatcctggcaccagcggctcttgttctggctgtggatctctgagcctgcctctgctggctggactggttgctgctgatgctgtggcctctctgctgattgtgggagccgtgttcagggaccaaagactgcctcctgacgctcacaaacctccaggcggaggcagcttcagaacccctatccaagaggaacaggctgacgcccacagcaccctggcaaaaattctgtgcgccagacctagaagaagccccgctcaagaggacggcaaggtgtacatcaacatgcccggcagaggataa

SEQ ID NO: 9572 - DNA, 2415 bp, Artificial Sequence
  Synthetic Polynucleotide
atggccttaccagtgaccgccttgctcctgccgctggccttgctgctccacgccgccaggccggaattcgaagccgacatctaccagacacctagatacctggtcatcggcaccggcaagaaaatcaccctggaatgcagccagacaatgggccacgacaagatgtactggtatcagcaggaccccggcatggaactgcacctgatccactacagctacggcgtgaacagcaccgagaagggcgatctgtctagcgagagcaccgtgtccagaatcagaaccgagcacttcccactgacactggaaagcgccagacctagccacaccagccagtacctgtgtgcctcttctgaggccagaggactggccgagttcaccgacacacagtatttcggccctggcaccagactgaccgttctcgaggacctgaagaacgtgttcccacctgaggtggccgtgttcgagcctagcgaggccgagatcagccacacccagaaagccaccctcgtgtgcctggctaccggcttctaccccgaccatgtggaactgtcttggtgggtcaacggcaaagaggtgcacagcggcgtgtctaccgacccccagccactgaaagaacagcccgccctgaacgacagccggtactgcctgagcagcagactgagagtgtccgccaccttctggcagaacccccggaaccacttcagatgccaggtgcagttctacggcctgagcgagaacgacgagtggacccaggacagagccaagcccgtgacccagatcgtgtctgccgaagcctggggcagagccgattgcggatccacaacacctggcgagagaagtagcctgcctgccttctatcctggcaccagcggctcttgttctggctgtggatctctgagcctgcctctgctggctggactggttgctgctgatgctgtggcctctctgctgattgtgggagccgtgttcctgtgcgccagacctagaagaagccccgctcaagaggacggcaaggtgtacatcaacatgcccggcagaggaagggccaagcgatctggatctggagcaacaaacttctcactactcaaacaagcaggtgacgtggaggagaatcccgggcctactagtatggactggatttggcgcatccttttccttgtcggcgctgctaccggcgcgcattccttcgaagcccagaccgtgacacagagccagcctgagatgtctgtgcaagaggccgagacagtgaccctgagctgcacctacgataccagcgagagcgactactacctgttctggtacaagcagcctcctagccggcagatgatcctggtcatccggcaagaagcctataagcagcagaacgccaccgagaacagattcagcgtgaacttccagaaggccgccaagagcttcagcctgaagatcagcgatagccagctgggcgacgccgccatgtacttttgcgcttatagaagcgccgtgaacgcccggctgatgtttggagatggcacacagctggtggtcaagcccaacacgcgtatccagaaccctgatcctgccgtgtaccagctgcgggatagcaagagcagcgacaagagcgtgtgtctgttcaccgacttcgacagccagaccaacgtgtcccagagcaaggactccgacgtgtacatcaccgataagaccgtgctggacatgcggagcatggacttcaagagcaactccgccgtggcctggtccaacaagtccgatttcgcctgcgccaacgccttcaacaacagcattatccccgaggacacattcttcccaagccccgagagcagctgcggtaccacaacacctggcgagagaagtagcctgcctgccttctatcctggcaccagcggctcttgttctggctgtggatctctgagcctgcctctgctggctggactggttgctgctgatgctgtggcctctctgctgattgtgggagccgtgttctggcggcggaagcggaaagagaagcagtctgagacaagccccaaagagttcctgaccatctacgaggacgtgaaggacctgaaaacccggcggaaccacgaacaagagcagacctttcctggcggaggcagcaccatctacagcatgatccagagccagagcagcgcccctacaagccaagagcctgcctacacactgtactccctgatccagcctagcagaaagagcggcagccggaagagaaatcacagccccagcttcaacagcacgatctacgaagtgatcggcaagagccagccaaaggctcagaaccctgccagactgagccggaaagagctggaaaacttcgacgtgtacagcctgtgcgccagacctagaagaagccccgctcaagaggacggcaaggtgtacatcaacatgcccggcagaggataa

SEQ ID NO: 9573 - DNA, 2268 bp, Artificial Sequence
  Synthetic Polynucleotide
atggccttaccagtgaccgccttgctcctgccgctggccttgctgctccacgccgccaggccggaattcgaagccgacatctaccagacacctagatacctggtcatcggcaccggcaagaaaatcaccctggaatgcagccagacaatgggccacgacaagatgtactggtatcagcaggaccccggcatggaactgcacctgatccactacagctacggcgtgaacagcaccgagaagggcgatctgtctagcgagagcaccgtgtccagaatcagaaccgagcacttcccactgacactggaaagcgccagacctagccacaccagccagtacctgtgtgcctcttctgaggccagaggactggccgagttcaccgacacacagtatttcggccctggcaccagactgaccgttctcgaggacctgaagaacgtgttcccacctgaggtggccgtgttcgagcctagcgaggccgagatcagccacacccagaaagccaccctcgtgtgcctggctaccggcttctaccccgaccatgtggaactgtcttggtgggtcaacggcaaagaggtgcacagcggcgtgtctaccgacccccagccactgaaagaacagcccgccctgaacgacagccggtactgcctgagcagcagactgagagtgtccgccaccttctggcagaacccccggaaccacttcagatgccaggtgcagttctacggcctgagcgagaacgacgagtggacccaggacagagccaagcccgtgacccagatcgtgtctgccgaagcctggggcagagccgattgcggatccctgggagagcctcagctgtgctatatcctggacgccatcctgtttctgtacggcatcgtgctgaccctgctgtactgcaaacggggcagaaagaaactcctgtatatattcaaacaaccatttatgagaccagtacaaactactcaagaggaagatggctgtagctgccgatttccagaagaagaagaaggaggatgtgaactgcggctgaagatccaagtgcggaaggccgccatcaccagctacgagaaatccgacggcgtgtacaccggcctgagcaccagaaatcaagagacatacgagacactgaagcacgaaaagcctccacaaagggccaagcgatctggatctggagcaacaaacttctcactactcaaacaagcaggtgacgtggaggagaatcccgggcctactagtatggactggatttggcgcatccttttccttgtcggcgctgctaccggcgcgcattccttcgaagcccagaccgtgacacagagccagcctgagatgtctgtgcaagaggccgagacagtgaccctgagctgcacctacgataccagcgagagcgactactacctgttctggtacaagcagcctcctagccggcagatgatcctggtcatccggcaagaagcctataagcagcagaacgccaccgagaacagattcagcgtgaacttccagaaggccgccaagagcttcagcctgaagatcagcgatagccagctgggcgacgccgccatgtacttttgcgcttatagaagcgccgtgaacgcccggctgatgtttggagatggcacacagctggtggtcaagcccaacacgcgtatccagaaccctgatcctgccgtgtaccagctgcgggatagcaagagcagcgacaagagcgtgtgtctgttcaccgacttcgacagccagaccaacgtgtcccagagcaaggactccgacgtgtacatcaccgataagaccgtgctggacatgcggagcatggacttcaagagcaactccgccgtggcctggtccaacaagtccgatttcgcctgcgccaacgccttcaacaacagcattatccccgaggacacattcttcccaagccccgagagcagctgcggtaccctgggagagcctcagctgtgctatatcctggacgccatcctgtttctgtacggcatcgtgctgaccctgctgtactgcaggagtaagaggagcaggctcctgcacagtgactacatgaacatgactccacgccgccccggacccacccgcaagcattaccagccctatgccccaccacgcgacttcgcagcctatcgctcccggctgaagatccaagtgcggaaggccgccatcaccagctacgagaaatccgacggcgtgtacaccggcctgagcaccagaaatcaagagacatacgagacactgaagcacgaaaagcctccacaataa

SEQ ID NO: 9574 - DNA, 2253 bp, Artificial Sequence
  Synthetic Polynucleotide
atggccttaccagtgaccgccttgctcctgccgctggccttgctgctccacgccgccaggccggaattcgaagccgacatctaccagacacctagatacctggtcatcggcaccggcaagaaaatcaccctggaatgcagccagacaatgggccacgacaagatgtactggtatcagcaggaccccggcatggaactgcacctgatccactacagctacggcgtgaacagcaccgagaagggcgatctgtctagcgagagcaccgtgtccagaatcagaaccgagcacttcccactgacactggaaagcgccagacctagccacaccagccagtacctgtgtgcctcttctgaggccagaggactggccgagttcaccgacacacagtatttcggccctggcaccagactgaccgttctcgaggacctgaagaacgtgttcccacctgaggtggccgtgttcgagcctagcgaggccgagatcagccacacccagaaagccaccctcgtgtgcctggctaccggcttctaccccgaccatgtggaactgtcttggtgggtcaacggcaaagaggtgcacagcggcgtgtctaccgacccccagccactgaaagaacagcccgccctgaacgacagccggtactgcctgagcagcagactgagagtgtccgccaccttctggcagaacccccggaaccacttcagatgccaggtgcagttctacggcctgagcgagaacgacgagtggacccaggacagagccaagcccgtgacccagatcgtgtctgccgaagcctggggcagagccgattgcggatccctgggagagcctcagctgtgctatatcctggacgccatcctgtttctgtacggcatcgtgctgaccctgctgtactgcaaacggggcagaaagaaactcctgtatatattcaaacaaccatttatgagaccagtacaaactactcaagaggaagatggctgtagctgccgatttccagaagaagaagaaggaggatgtgaactgcggctgaagatccaagtgcggaaggccgccatcaccagctacgagaaatccgacggcgtgtacaccggcctgagcaccagaaatcaagagacatacgagacactgaagcacgaaaagcctccacaaagggccaagcgatctggatctggagcaacaaacttctcactactcaaacaagcaggtgacgtggaggagaatcccgggcctactagtatggactggatttggcgcatccttttccttgtcggcgctgctaccggcgcgcattccttcgaagcccagaccgtgacacagagccagcctgagatgtctgtgcaagaggccgagacagtgaccctgagctgcacctacgataccagcgagagcgactactacctgttctggtacaagcagcctcctagccggcagatgatcctggtcatccggcaagaagcctataagcagcagaacgccaccgagaacagattcagcgtgaacttccagaaggccgccaagagcttcagcctgaagatcagcgatagccagctgggcgacgccgccatgtacttttgcgcttatagaagcgccgtgaacgcccggctgatgtttggagatggcacacagctggtggtcaagcccaacacgcgtatccagaaccctgatcctgccgtgtaccagctgcgggatagcaagagcagcgacaagagcgtgtgtctgttcaccgacttcgacagccagaccaacgtgtcccagagcaaggactccgacgtgtacatcaccgataagaccgtgctggacatgcggagcatggacttcaagagcaactccgccgtggcctggtccaacaagtccgatttcgcctgcgccaacgccttcaacaacagcattatccccgaggacacattcttcccaagccccgagagcagctgcggtaccctgggagagcctcagctgtgctatatcctggacgccatcctgtttctgtacggcatcgtgctgaccctgctgtactgcagggaccaaagactgcctcctgacgctcacaaacctccaggcggaggcagcttcagaacccctatccaagaggaacaggctgacgcccacagcaccctggcaaaaattcggctgaagatccaagtgcggaaggccgccatcaccagctacgagaaatccgacggcgtgtacaccggcctgagcaccagaaatcaagagacatacgagacactgaagcacgaaaagcctccacaataa

SEQ ID NO: 9575 - DNA, 2505 bp, Artificial Sequence
  Synthetic Polynucleotide
atggccttaccagtgaccgccttgctcctgccgctggccttgctgctccacgccgccaggccggaattcgaagccgacatctaccagacacctagatacctggtcatcggcaccggcaagaaaatcaccctggaatgcagccagacaatgggccacgacaagatgtactggtatcagcaggaccccggcatggaactgcacctgatccactacagctacggcgtgaacagcaccgagaagggcgatctgtctagcgagagcaccgtgtccagaatcagaaccgagcacttcccactgacactggaaagcgccagacctagccacaccagccagtacctgtgtgcctcttctgaggccagaggactggccgagttcaccgacacacagtatttcggccctggcaccagactgaccgttctcgaggacctgaagaacgtgttcccacctgaggtggccgtgttcgagcctagcgaggccgagatcagccacacccagaaagccaccctcgtgtgcctggctaccggcttctaccccgaccatgtggaactgtcttggtgggtcaacggcaaagaggtgcacagcggcgtgtctaccgacccccagccactgaaagaacagcccgccctgaacgacagccggtactgcctgagcagcagactgagagtgtccgccaccttctggcagaacccccggaaccacttcagatgccaggtgcagttctacggcctgagcgagaacgacgagtggacccaggacagagccaagcccgtgacccagatcgtgtctgccgaagcctggggcagagccgattgcggatccctgggagagcctcagctgtgctatatcctggacgccatcctgtttctgtacggcatcgtgctgaccctgctgtactgcaaacggggcagaaagaaactcctgtatatattcaaacaaccatttatgagaccagtacaaactactcaagaggaagatggctgtagctgccgatttccagaagaagaagaaggaggatgtgaactgcggctgaagatccaagtgcggaaggccgccatcaccagctacgagaaatccgacggcgtgtacaccggcctgagcaccagaaatcaagagacatacgagacactgaagcacgaaaagcctccacaaagggccaagcgatctggatctggagcaacaaacttctcactactcaaacaagcaggtgacgtggaggagaatcccgggcctactagtatggactggatttggcgcatccttttccttgtcggcgctgctaccggcgcgcattccttcgaagcccagaccgtgacacagagccagcctgagatgtctgtgcaagaggccgagacagtgaccctgagctgcacctacgataccagcgagagcgactactacctgttctggtacaagcagcctcctagccggcagatgatcctggtcatccggcaagaagcctataagcagcagaacgccaccgagaacagattcagcgtgaacttccagaaggccgccaagagcttcagcctgaagatcagcgatagccagctgggcgacgccgccatgtacttttgcgcttatagaagcgccgtgaacgcccggctgatgtttggagatggcacacagctggtggtcaagcccaacacgcgtatccagaaccctgatcctgccgtgtaccagctgcgggatagcaagagcagcgacaagagcgtgtgtctgttcaccgacttcgacagccagaccaacgtgtcccagagcaaggactccgacgtgtacatcaccgataagaccgtgctggacatgcggagcatggacttcaagagcaactccgccgtggcctggtccaacaagtccgatttcgcctgcgccaacgccttcaacaacagcattatccccgaggacacattcttcccaagccccgagagcagctgcggtaccctgggagagcctcagctgtgctatatcctggacgccatcctgtttctgtacggcatcgtgctgaccctgctgtactgctggcggcggaagcggaaagagaagcagtctgagacaagccccaaagagttcctgaccatctacgaggacgtgaaggacctgaaaacccggcggaaccacgaacaagagcagacctttcctggcggaggcagcaccatctacagcatgatccagagccagagcagcgcccctacaagccaagagcctgcctacacactgtactccctgatccagcctagcagaaagagcggcagccggaagagaaatcacagccccagcttcaacagcacgatctacgaagtgatcggcaagagccagccaaaggctcagaaccctgccagactgagccggaaagagctggaaaacttcgacgtgtacagccggctgaagatccaagtgcggaaggccgccatcaccagctacgagaaatccgacggcgtgtacaccggcctgagcaccagaaatcaagagacatacgagacactgaagcacgaaaagcctccacaataa

SEQ ID NO: 9576 - DNA, 2271 bp, Artificial Sequence
  Synthetic Polynucleotide
atggccttaccagtgaccgccttgctcctgccgctggccttgctgctccacgccgccaggccggaattcgaagccgacatctaccagacacctagatacctggtcatcggcaccggcaagaaaatcaccctggaatgcagccagacaatgggccacgacaagatgtactggtatcagcaggaccccggcatggaactgcacctgatccactacagctacggcgtgaacagcaccgagaagggcgatctgtctagcgagagcaccgtgtccagaatcagaaccgagcacttcccactgacactggaaagcgccagacctagccacaccagccagtacctgtgtgcctcttctgaggccagaggactggccgagttcaccgacacacagtatttcggccctggcaccagactgaccgttctcgaggacctgaagaacgtgttcccacctgaggtggccgtgttcgagcctagcgaggccgagatcagccacacccagaaagccaccctcgtgtgcctggctaccggcttctaccccgaccatgtggaactgtcttggtgggtcaacggcaaagaggtgcacagcggcgtgtctaccgacccccagccactgaaagaacagcccgccctgaacgacagccggtactgcctgagcagcagactgagagtgtccgccaccttctggcagaacccccggaaccacttcagatgccaggtgcagttctacggcctgagcgagaacgacgagtggacccaggacagagccaagcccgtgacccagatcgtgtctgccgaagcctggggcagagccgattgcggatccctgggagagcctcagctgtgctatatcctggacgccatcctgtttctgtacggcatcgtgctgaccctgctgtactgcaaacggggcagaaagaaactcctgtatatattcaaacaaccatttatgagaccagtacaaactactcaagaggaagatggctgtagctgccgatttccagaagaagaagaaggaggatgtgaactgcggctgaagatccaagtgcggaaggccgccatcaccagctacgagaaatccgacggcgtgtacaccggcctgagcaccagaaatcaagagacatacgagacactgaagcacgaaaagcctccacaaagggccaagcgatctggatctggagcaacaaacttctcactactcaaacaagcaggtgacgtggaggagaatcccgggcctactagtatggactggatttggcgcatccttttccttgtcggcgctgctaccggcgcgcattccttcgaagcccagaccgtgacacagagccagcctgagatgtctgtgcaagaggccgagacagtgaccctgagctgcacctacgataccagcgagagcgactactacctgttctggtacaagcagcctcctagccggcagatgatcctggtcatccggcaagaagcctataagcagcagaacgccaccgagaacagattcagcgtgaacttccagaaggccgccaagagcttcagcctgaagatcagcgatagccagctgggcgacgccgccatgtacttttgcgcttatagaagcgccgtgaacgcccggctgatgtttggagatggcacacagctggtggtcaagcccaacacgcgtatccagaaccctgatcctgccgtgtaccagctgcgggatagcaagagcagcgacaagagcgtgtgtctgttcaccgacttcgacagccagaccaacgtgtcccagagcaaggactccgacgtgtacatcaccgataagaccgtgctggacatgcggagcatggacttcaagagcaactccgccgtggcctggtccaacaagtccgatttcgcctgcgccaacgccttcaacaacagcattatccccgaggacacattcttcccaagccccgagagcagctgcggtaccctcggagaaccacagctctgttacattctggatgctatcctgttcctctatgggatcgtcctgacactcctgtattgcaagagaggccggaagaagctgctgtacatcttcaagcagcctttcatgcggcccgtgcagaccacccaggaagaggacggctgctcctgccggttccccgaggaagaagaaggcggctgcgagctgagactcaaaattcaagttcgcaaagccgccattacctcttacgagaagagtgatggggtgtacacaggactgtctacccggaatcaagaaacctacgaaaccctcaaacatgagaagccacctcagtaa

SEQ ID NO: 9577 - DNA, 2268 bp, Artificial Sequence
  Synthetic Polynucleotide
atggccttaccagtgaccgccttgctcctgccgctggccttgctgctccacgccgccaggccggaattcgaagccgacatctaccagacacctagatacctggtcatcggcaccggcaagaaaatcaccctggaatgcagccagacaatgggccacgacaagatgtactggtatcagcaggaccccggcatggaactgcacctgatccactacagctacggcgtgaacagcaccgagaagggcgatctgtctagcgagagcaccgtgtccagaatcagaaccgagcacttcccactgacactggaaagcgccagacctagccacaccagccagtacctgtgtgcctcttctgaggccagaggactggccgagttcaccgacacacagtatttcggccctggcaccagactgaccgttctcgaggacctgaagaacgtgttcccacctgaggtggccgtgttcgagcctagcgaggccgagatcagccacacccagaaagccaccctcgtgtgcctggctaccggcttctaccccgaccatgtggaactgtcttggtgggtcaacggcaaagaggtgcacagcggcgtgtctaccgacccccagccactgaaagaacagcccgccctgaacgacagccggtactgcctgagcagcagactgagagtgtccgccaccttctggcagaacccccggaaccacttcagatgccaggtgcagttctacggcctgagcgagaacgacgagtggacccaggacagagccaagcccgtgacccagatcgtgtctgccgaagcctggggcagagccgattgcggatccctgggagagcctcagctgtgctatatcctggacgccatcctgtttctgtacggcatcgtgctgaccctgctgtactgcaaacggggcagaaagaaactcctgtatatattcaaacaaccatttatgagaccagtacaaactactcaagaggaagatggctgtagctgccgatttccagaagaagaagaaggaggatgtgaactgcggctgaagatccaagtgcggaaggccgccatcaccagctacgagaaatccgacggcgtgtacaccggcctgagcaccagaaatcaagagacatacgagacactgaagcacgaaaagcctccacaaagggccaagcgatctggatctggagcaacaaacttctcactactcaaacaagcaggtgacgtggaggagaatcccgggcctactagtatggactggatttggcgcatccttttccttgtcggcgctgctaccggcgcgcattccttcgaagcccagaccgtgacacagagccagcctgagatgtctgtgcaagaggccgagacagtgaccctgagctgcacctacgataccagcgagagcgactactacctgttctggtacaagcagcctcctagccggcagatgatcctggtcatccggcaagaagcctataagcagcagaacgccaccgagaacagattcagcgtgaacttccagaaggccgccaagagcttcagcctgaagatcagcgatagccagctgggcgacgccgccatgtacttttgcgcttatagaagcgccgtgaacgcccggctgatgtttggagatggcacacagctggtggtcaagcccaacacgcgtatccagaaccctgatcctgccgtgtaccagctgcgggatagcaagagcagcgacaagagcgtgtgtctgttcaccgacttcgacagccagaccaacgtgtcccagagcaaggactccgacgtgtacatcaccgataagaccgtgctggacatgcggagcatggacttcaagagcaactccgccgtggcctggtccaacaagtccgatttcgcctgcgccaacgccttcaacaacagcattatccccgaggacacattcttcccaagccccgagagcagctgcggtaccctcggagaaccacagctctgttacattctggatgctatcctgttcctctatgggatcgtcctgacactcctgtattgcaggagcaagcggtcacggctgctccacagcgattacatgaatatgacaccacgaagaccgggtcctactcgcaaacactaccaaccctacgcacctccccgcgactttgcagcgtaccgatctagactcaaaattcaagttcgcaaagccgccattacctcttacgagaagagtgatggggtgtacacaggactgtctacccggaatcaagaaacctacgaaaccctcaaacatgagaagccacctcagtaa

SEQ ID NO: 9578 - DNA, 2265 bp, Artificial Sequence
  Synthetic Polynucleotide
atggccttaccagtgaccgccttgctcctgccgctggccttgctgctccacgccgccaggccggaattcgaagccgacatctaccagacacctagatacctggtcatcggcaccggcaagaaaatcaccctggaatgcagccagacaatgggccacgacaagatgtactggtatcagcaggaccccggcatggaactgcacctgatccactacagctacggcgtgaacagcaccgagaagggcgatctgtctagcgagagcaccgtgtccagaatcagaaccgagcacttcccactgacactggaaagcgccagacctagccacaccagccagtacctgtgtgcctcttctgaggccagaggactggccgagttcaccgacacacagtatttcggccctggcaccagactgaccgttctcgaggacctgaagaacgtgttcccacctgaggtggccgtgttcgagcctagcgaggccgagatcagccacacccagaaagccaccctcgtgtgcctggctaccggcttctaccccgaccatgtggaactgtcttggtgggtcaacggcaaagaggtgcacagcggcgtgtctaccgacccccagccactgaaagaacagcccgccctgaacgacagccggtactgcctgagcagcagactgagagtgtccgccaccttctggcagaacccccggaaccacttcagatgccaggtgcagttctacggcctgagcgagaacgacgagtggacccaggacagagccaagcccgtgacccagatcgtgtctgccgaagcctggggcagagccgattgcggatccctgggagagcctcagctgtgctatatcctggacgccatcctgtttctgtacggcatcgtgctgaccctgctgtactgcaggagtaagaggagcaggctcctgcacagtgactacatgaacatgactccacgccgccccggacccacccgcaagcattaccagccctatgccccaccacgcgacttcgcagcctatcgctcccggctgaagatccaagtgcggaaggccgccatcaccagctacgagaaatccgacggcgtgtacaccggcctgagcaccagaaatcaagagacatacgagacactgaagcacgaaaagcctccacaaagggccaagcgatctggatctggagcaacaaacttctcactactcaaacaagcaggtgacgtggaggagaatcccgggcctactagtatggactggatttggcgcatccttttccttgtcggcgctgctaccggcgcgcattccttcgaagcccagaccgtgacacagagccagcctgagatgtctgtgcaagaggccgagacagtgaccctgagctgcacctacgataccagcgagagcgactactacctgttctggtacaagcagcctcctagccggcagatgatcctggtcatccggcaagaagcctataagcagcagaacgccaccgagaacagattcagcgtgaacttccagaaggccgccaagagcttcagcctgaagatcagcgatagccagctgggcgacgccgccatgtacttttgcgcttatagaagcgccgtgaacgcccggctgatgtttggagatggcacacagctggtggtcaagcccaacacgcgtatccagaaccctgatcctgccgtgtaccagctgcgggatagcaagagcagcgacaagagcgtgtgtctgttcaccgacttcgacagccagaccaacgtgtcccagagcaaggactccgacgtgtacatcaccgataagaccgtgctggacatgcggagcatggacttcaagagcaactccgccgtggcctggtccaacaagtccgatttcgcctgcgccaacgccttcaacaacagcattatccccgaggacacattcttcccaagccccgagagcagctgcggtaccctcggagaaccacagctctgttacattctggatgctatcctgttcctctatgggatcgtcctgacactcctgtattgcaggagcaagcggtcacggctgctccacagcgattacatgaatatgacaccacgaagaccgggtcctactcgcaaacactaccaaccctacgcacctccccgcgactttgcagcgtaccgatctagactcaaaattcaagttcgcaaagccgccattacctcttacgagaagagtgatggggtgtacacaggactgtctacccggaatcaagaaacctacgaaaccctcaaacatgagaagccacctcagtaa

SEQ ID NO: 9579 - DNA, 2019 bp, Artificial Sequence
  Synthetic Polynucleotide
atggccttaccagtgaccgccttgctcctgccgctggccttgctgctccacgccgccaggccggaattcgaagccgacatctaccagacacctagatacctggtcatcggcaccggcaagaaaatcaccctggaatgcagccagacaatgggccacgacaagatgtactggtatcagcaggaccccggcatggaactgcacctgatccactacagctacggcgtgaacagcaccgagaagggcgatctgtctagcgagagcaccgtgtccagaatcagaaccgagcacttcccactgacactggaaagcgccagacctagccacaccagccagtacctgtgtgcctcttctgaggccagaggactggccgagttcaccgacacacagtatttcggccctggcaccagactgaccgttctcgaggacctgaagaacgtgttcccacctgaggtggccgtgttcgagcctagcgaggccgagatcagccacacccagaaagccaccctcgtgtgcctggctaccggcttctaccccgaccatgtggaactgtcttggtgggtcaacggcaaagaggtgcacagcggcgtgtctaccgacccccagccactgaaagaacagcccgccctgaacgacagccggtactgcctgagcagcagactgagagtgtccgccaccttctggcagaacccccggaaccacttcagatgccaggtgcagttctacggcctgagcgagaacgacgagtggacccaggacagagccaagcccgtgacccagatcgtgtctgccgaagcctggggcagagccgattgcggatccctgggagagcctcagctgagctatatcctggacgccatcctgtttctgtacggcatcgtgctgaccctgctgtactgccggctgaagatccaagtgcggaaggccgccatcaccagctacgagaaatccgacggcgtgtacaccggcctgagcaccagaaatcaagagacatacgagacactgaagcacgaaaagcctccacaaagggccaagcgatctggatctggagcaacaaacttctcactactcaaacaagcaggtgacgtggaggagaatcccgggcctactagtatggactggatttggcgcatccttttccttgtcggcgctgctaccggcgcgcattccttcgaagcccagaccgtgacacagagccagcctgagatgtctgtgcaagaggccgagacagtgaccctgagctgcacctacgataccagcgagagcgactactacctgttctggtacaagcagcctcctagccggcagatgatcctggtcatccggcaagaagcctataagcagcagaacgccaccgagaacagattcagcgtgaacttccagaaggccgccaagagcttcagcctgaagatcagcgatagccagctgggcgacgccgccatgtacttttgcgcttatagaagcgccgtgaacgcccggctgatgtttggagatggcacacagctggtggtcaagcccaacacgcgtatccagaaccctgatcctgccgtgtaccagctgcgggatagcaagagcagcgacaagagcgtgtgtctgttcaccgacttcgacagccagaccaacgtgtcccagagcaaggactccgacgtgtacatcaccgataagaccgtgctggacatgcggagcatggacttcaagagcaactccgccgtggcctggtccaacaagtccgatttcgcctgcgccaacgccttcaacaacagcattatccccgaggacacattcttcccaagccccgagagcagctgcggtaccctcggagaaccacagctctcttacattctggatgctatcctgttcctctatgggatcgtcctgacactcctgtattgcagactcaaaattcaagttcgcaaagccgccattacctcttacgagaagagtgatggggtgtacacaggactgtctacccggaatcaagaaacctacgaaaccctcaaacatgagaagccacctcagtaa

SEQ ID NO: 9580 - DNA, 2127 bp, Artificial Sequence
  Synthetic Polynucleotide
atggccttaccagtgaccgccttgctcctgccgctggccttgctgctccacgccgccaggccggaattcgaagccgacatctaccagacacctagatacctggtcatcggcaccggcaagaaaatcaccctggaatgcagccagacaatgggccacgacaagatgtactggtatcagcaggaccccggcatggaactgcacctgatccactacagctacggcgtgaacagcaccgagaagggcgatctgtctagcgagagcaccgtgtccagaatcagaaccgagcacttcccactgacactggaaagcgccagacctagccacaccagccagtacctgtgtgcctcttctgaggccagaggactggccgagttcaccgacacacagtatttcggccctggcaccagactgaccgttctcgaggacctgaagaacgtgttcccacctgaggtggccgtgttcgagcctagcgaggccgagatcagccacacccagaaagccaccctcgtgtgcctggctaccggcttctaccccgaccatgtggaactgtcttggtgggtcaacggcaaagaggtgcacagcggcgtgtctaccgacccccagccactgaaagaacagcccgccctgaacgacagccggtactgcctgagcagcagactgagagtgtccgccaccttctggcagaacccccggaaccacttcagatgccaggtgcagttctacggcctgagcgagaacgacgagtggacccaggacagagccaagcccgtgacccagatcgtgtctgccgaagcctggggcagagccgattgcggatcccaggctcagagcgattgcagctgtagcacagtgtctccaggcgtgctggccggaattgtgatgggcgatctggtgctgacagtgctgattgccctggccgtgtacttcctgggtagactggtgcctagaggaagaggcgctgccgaagccgccacaagaaagcagagaatcaccgagacagagagcccctaccaagagctgcaaggccagagaagcgacgtgtacagcgacctgaatacccagcggccttactacaaaagggccaagcgatctggatctggagcaacaaacttctcactactcaaacaagcaggtgacgtggaggagaatcccgggcctactagtatggactggatttggcgcatccttttccttgtcggcgctgctaccggcgcgcattccttcgaagcccagaccgtgacacagagccagcctgagatgtctgtgcaagaggccgagacagtgaccctgagctgcacctacgataccagcgagagcgactactacctgttctggtacaagcagcctcctagccggcagatgatcctggtcatccggcaagaagcctataagcagcagaacgccaccgagaacagattcagcgtgaacttccagaaggccgccaagagcttcagcctgaagatcagcgatagccagctgggcgacgccgccatgtacttttgcgcttatagaagcgccgtgaacgcccggctgatgtttggagatggcacacagctggtggtcaagcccaacacgcgtatccagaaccctgatcctgccgtgtaccagctgcgggatagcaagagcagcgacaagagcgtgtgtctgttcaccgacttcgacagccagaccaacgtgtcccagagcaaggactccgacgtgtacatcaccgataagaccgtgctggacatgcggagcatggacttcaagagcaactccgccgtggcctggtccaacaagtccgatttcgcctgcgccaacgccttcaacaacagcattatccccgaggacacattcttcccaagccccgagagcagctgcggtacccaggctcagagcgattgcagctctagcacagtgtctccaggcgtgctggccggaattgtgatgggcgatctggtgctgacagtgctgattgccctggccgtgtacttcctgggtagactggtgcctagaggaagaggcgctgccgaagccgccacaagaaagcagagaatcaccgagacagagagcccctaccaagagctgcaaggccagagaagcgacgtgtacagcgacctgaatacccagcggccttactacaaataa

SEQ ID NO: 9581 - DNA, 2253 bp, Artificial Sequence
  Synthetic Polynucleotide
atggccttaccagtgaccgccttgctcctgccgctggccttgctgctccacgccgccaggccggaattcgaagccgacatctaccagacacctagatacctggtcatcggcaccggcaagaaaatcaccctggaatgcagccagacaatgggccacgacaagatgtactggtatcagcaggaccccggcatggaactgcacctgatccactacagctacggcgtgaacagcaccgagaagggcgatctgtctagcgagagcaccgtgtccagaatcagaaccgagcacttcccactgacactggaaagcgccagacctagccacaccagccagtacctgtgtgcctcttctgaggccagaggactggccgagttcaccgacacacagtatttcggccctggcaccagactgaccgttctcgaggacctgaagaacgtgttcccacctgaggtggccgtgttcgagcctagcgaggccgagatcagccacacccagaaagccaccctcgtgtgcctggctaccggcttctaccccgaccatgtggaactgtcttggtgggtcaacggcaaagaggtgcacagcggcgtgtctaccgacccccagccactgaaagaacagcccgccctgaacgacagccggtactgcctgagcagcagactgagagtgtccgccaccttctggcagaacccccggaaccacttcagatgccaggtgcagttctacggcctgagcgagaacgacgagtggacccaggacagagccaagcccgtgacccagatcgtgtctgccgaagcctggggcagagccgattgcggatcccaggctcagagcgattgcagctgtagcacagtgtctccaggcgtgctggccggaattgtgatgggcgatctggtgctgacagtgctgattgccctggccgtgtacttcctgggtagactggtgcctagaggaagaggcgctgccgaagccgccacaagaaagcagagaatcaccgagacagagagcccctaccaagagctgcaaggccagagaagcgacgtgtacagcgacctgaatacccagcggccttactacaaaagggccaagcgatctggatctggagcaacaaacttctcactactcaaacaagcaggtgacgtggaggagaatcccgggcctactagtatggactggatttggcgcatccttttccttgtcggcgctgctaccggcgcgcattccttcgaagcccagaccgtgacacagagccagcctgagatgtctgtgcaagaggccgagacagtgaccctgagctgcacctacgataccagcgagagcgactactacctgttctggtacaagcagcctcctagccggcagatgatcctggtcatccggcaagaagcctataagcagcagaacgccaccgagaacagattcagcgtgaacttccagaaggccgccaagagcttcagcctgaagatcagcgatagccagctgggcgacgccgccatgtacttttgcgcttatagaagcgccgtgaacgcccggctgatgtttggagatggcacacagctggtggtcaagcccaacacgcgtatccagaaccctgatcctgccgtgtaccagctgcgggatagcaagagcagcgacaagagcgtgtgtctgttcaccgacttcgacagccagaccaacgtgtcccagagcaaggactccgacgtgtacatcaccgataagaccgtgctggacatgcggagcatggacttcaagagcaactccgccgtggcctggtccaacaagtccgatttcgcctgcgccaacgccttcaacaacagcattatccccgaggacacattcttcccaagccccgagagcagctgcggtacccaggctcagagcgattgcagctgtagcacagtgtctccaggcgtgctggccggaattgtgatgggcgatctggtgctgacagtgctgattgccctggccgtgtacttcctgggtagactggtgcctagaggaagaggcgctgccgaagccgccacaagaaagcagagaatcaccgagacagagagcccctaccaagagctgcaaggccagagaagcgacgtgtacagcgacctgaatacccagaaacggggcagaaagaaactcctgtatatattcaaacaaccatttatgagaccagtacaaactactcaagaggaagatggctgtagctgccgatttccagaagaagaagaaggaggatgtgaactgcggccttactacaaataa

SEQ ID NO: 9582 - DNA, 2250 bp, Artificial Sequence
  Synthetic Polynucleotide
atggccttaccagtgaccgccttgctcctgccgctggccttgctgctccacgccgccaggccggaattcgaagccgacatctaccagacacctagatacctggtcatcggcaccggcaagaaaatcaccctggaatgcagccagacaatgggccacgacaagatgtactggtatcagcaggaccccggcatggaactgcacctgatccactacagctacggcgtgaacagcaccgagaagggcgatctgtctagcgagagcaccgtgtccagaatcagaaccgagcacttcccactgacactggaaagcgccagacctagccacaccagccagtacctgtgtgcctcttctgaggccagaggactggccgagttcaccgacacacagtatttcggccctggcaccagactgaccgttctcgaggacctgaagaacgtgttcccacctgaggtggccgtgttcgagcctagcgaggccgagatcagccacacccagaaagccaccctcgtgtgcctggctaccggcttctaccccgaccatgtggaactgtcttggtgggtcaacggcaaagaggtgcacagcggcgtgtctaccgacccccagccactgaaagaacagcccgccctgaacgacagccggtactgcctgagcagcagactgagagtgtccgccaccttctggcagaacccccggaaccacttcagatgccaggtgcagttctacggcctgagcgagaacgacgagtggacccaggacagagccaagcccgtgacccagatcgtgtctgccgaagcctggggcagagccgattgcggatcccaggctcagagcgattgcagctgtagcacagtgtctccaggcgtgctggccggaattgtgatgggcgatctggtgctgacagtgctgattgccctggccgtgtacttcctgggtagactggtgcctagaggaagaggcgctgccgaagccgccacaagaaagcagagaatcaccgagacagagagcccctaccaagagctgcaaggccagagaagcgacgtgtacagcgacctgaatacccagcggccttactacaaaagggccaagcgatctggatctggagcaacaaacttctcactactcaaacaagcaggtgacgtggaggagaatcccgggcctactagtatggactggatttggcgcatccttttccttgtcggcgctgctaccggcgcgcattccttcgaagcccagaccgtgacacagagccagcctgagatgtctgtgcaagaggccgagacagtgaccctgagctgcacctacgataccagcgagagcgactactacctgttctggtacaagcagcctcctagccggcagatgatcctggtcatccggcaagaagcctataagcagcagaacgccaccgagaacagattcagcgtgaacttccagaaggccgccaagagcttcagcctgaagatcagcgatagccagctgggcgacgccgccatgtacttttgcgcttatagaagcgccgtgaacgcccggctgatgtttggagatggcacacagctggtggtcaagcccaacacgcgtatccagaaccctgatcctgccgtgtaccagctgcgggatagcaagagcagcgacaagagcgtgtgtctgttcaccgacttcgacagccagaccaacgtgtcccagagcaaggactccgacgtgtacatcaccgataagaccgtgctggacatgcggagcatggacttcaagagcaactccgccgtggcctggtccaacaagtccgatttcgcctgcgccaacgccttcaacaacagcattatccccgaggacacattcttcccaagccccgagagcagctgcggtacccaggctcagagcgattgcagctgtagcacagtgtctccaggcgtgctggccggaattgtgatgggcgatctggtgctgacagtgctgattgccctggccgtgtacttcctgggtagactggtgcctagaggaagaggcgctgccgaagccgccacaagaaagcagagaatcaccgagacagagagcccctaccaagagctgcaaggccagagaagcgacgtgtacagcgacctgaatacccagaggagcaagcggtcacggctgctccacagcgattacatgaatatgacaccacgaagaccgggtcctactcgcaaacactaccaaccctacgcacctccccgcgactttgcagcgtaccgatctcggccttactacaaataa

SEQ ID NO: 9583 - DNA, 2235 bp, Artificial Sequence
  Synthetic Polynucleotide
atggccttaccagtgaccgccttgctcctgccgctggccttgctgctccacgccgccaggccggaattcgaagccgacatctaccagacacctagatacctggtcatcggcaccggcaagaaaatcaccctggaatgcagccagacaatgggccacgacaagatgtactggtatcagcaggaccccggcatggaactgcacctgatccactacagctacggcgtgaacagcaccgagaagggcgatctgtctagcgagagcaccgtgtccagaatcagaaccgagcacttcccactgacactggaaagcgccagacctagccacaccagccagtacctgtgtgcctcttctgaggccagaggactggccgagttcaccgacacacagtatttcggccctggcaccagactgaccgttctcgaggacctgaagaacgtgttcccacctgaggtggccgtgttcgagcctagcgaggccgagatcagccacacccagaaagccaccctcgtgtgcctggctaccggcttctaccccgaccatgtggaactgtcttggtgggtcaacggcaaagaggtgcacagcggcgtgtctaccgacccccagccactgaaagaacagcccgccctgaacgacagccggtactgcctgagcagcagactgagagtgtccgccaccttctggcagaacccccggaaccacttcagatgccaggtgcagttctacggcctgagcgagaacgacgagtggacccaggacagagccaagcccgtgacccagatcgtgtctgccgaagcctggggcagagccgattgcggatcccaggctcagagcgattgcagctgtagcacagtgtctccaggcgtgctggccggaattgtgatgggcgatctggtgctgacagtgctgattgccctggccgtgtacttcctgggtagactggtgcctagaggaagaggcgctgccgaagccgccacaagaaagcagagaatcaccgagacagagagcccctaccaagagctgcaaggccagagaagcgacgtgtacagcgacctgaatacccagcggccttactacaaaagggccaagcgatctggatctggagcaacaaacttctcactactcaaacaagcaggtgacgtggaggagaatcccgggcctactagtatggactggatttggcgcatccttttccttgtcggcgctgctaccggcgcgcattccttcgaagcccagaccgtgacacagagccagcctgagatgtctgtgcaagaggccgagacagtgaccctgagctgcacctacgataccagcgagagcgactactacctgttctggtacaagcagcctcctagccggcagatgatcctggtcatccggcaagaagcctataagcagcagaacgccaccgagaacagattcagcgtgaacttccagaaggccgccaagagcttcagcctgaagatcagcgatagccagctgggcgacgccgccatgtacttttgcgcttatagaagcgccgtgaacgcccggctgatgtttggagatggcacacagctggtggtcaagcccaacacgcgtatccagaaccctgatcctgccgtgtaccagctgcgggatagcaagagcagcgacaagagcgtgtgtctgttcaccgacttcgacagccagaccaacgtgtcccagagcaaggactccgacgtgtacatcaccgataagaccgtgctggacatgcggagcatggacttcaagagcaactccgccgtggcctggtccaacaagtccgatttcgcctgcgccaacgccttcaacaacagcattatccccgaggacacattcttcccaagccccgagagcagctgcggtacccaggctcagagcgattgcagctgtagcacagtgtctccaggcgtgctggccggaattgtgatgggcgatctggtgctgacagtgctgattgccctggccgtgtacttcctgggtagactggtgcctagaggaagaggcgctgccgaagccgccacaagaaagcagagaatcaccgagacagagagcccctaccaagagctgcaaggccagagaagcgacgtgtacagcgacctgaatacccagagggaccaaagactgcctcctgacgctcacaaacctccaggcggaggcagcttcagaacccctatccaagaggaacaggctgacgcccacagcaccctggcaaaaattcggccttactacaaataa

SEQ ID NO: 9584 - DNA, 2487 bp, Artificial Sequence
  Synthetic Polynucleotide
atggccttaccagtgaccgccttgctcctgccgctggccttgctgctccacgccgccaggccggaattcgaagccgacatctaccagacacctagatacctggtcatcggcaccggcaagaaaatcaccctggaatgcagccagacaatgggccacgacaagatgtactggtatcagcaggaccccggcatggaactgcacctgatccactacagctacggcgtgaacagcaccgagaagggcgatctgtctagcgagagcaccgtgtccagaatcagaaccgagcacttcccactgacactggaaagcgccagacctagccacaccagccagtacctgtgtgcctcttctgaggccagaggactggccgagttcaccgacacacagtatttcggccctggcaccagactgaccgttctcgaggacctgaagaacgtgttcccacctgaggtggccgtgttcgagcctagcgaggccgagatcagccacacccagaaagccaccctcgtgtgcctggctaccggcttctaccccgaccatgtggaactgtcttggtgggtcaacggcaaagaggtgcacagcggcgtgtctaccgacccccagccactgaaagaacagcccgccctgaacgacagccggtactgcctgagcagcagactgagagtgtccgccaccttctggcagaacccccggaaccacttcagatgccaggtgcagttctacggcctgagcgagaacgacgagtggacccaggacagagccaagcccgtgacccagatcgtgtctgccgaagcctggggcagagccgattgcggatcccaggctcagagcgattgcagctgtagcacagtgtctccaggcgtgctggccggaattgtgatgggcgatctggtgctgacagtgctgattgccctggccgtgtacttcctgggtagactggtgcctagaggaagaggcgctgccgaagccgccacaagaaagcagagaatcaccgagacagagagcccctaccaagagctgcaaggccagagaagcgacgtgtacagcgacctgaatacccagcggccttactacaaaagggccaagcgatctggatctggagcaacaaacttctcactactcaaacaagcaggtgacgtggaggagaatcccgggcctactagtatggactggatttggcgcatccttttccttgtcggcgctgctaccggcgcgcattccttcgaagcccagaccgtgacacagagccagcctgagatgtctgtgcaagaggccgagacagtgaccctgagctgcacctacgataccagcgagagcgactactacctgttctggtacaagcagcctcctagccggcagatgatcctggtcatccggcaagaagcctataagcagcagaacgccaccgagaacagattcagcgtgaacttccagaaggccgccaagagcttcagcctgaagatcagcgatagccagctgggcgacgccgccatgtacttttgcgcttatagaagcgccgtgaacgcccggctgatgtttggagatggcacacagctggtggtcaagcccaacacgcgtatccagaaccctgatcctgccgtgtaccagctgcgggatagcaagagcagcgacaagagcgtgtgtctgttcaccgacttcgacagccagaccaacgtgtcccagagcaaggactccgacgtgtacatcaccgataagaccgtgctggacatgcggagcatggacttcaagagcaactccgccgtggcctggtccaacaagtccgatttcgcctgcgccaacgccttcaacaacagcattatccccgaggacacattcttcccaagccccgagagcagctgcggtacccaggctcagagcgattgcagctgtagcacagtgtctccaggcgtgctggccggaattgtgatgggcgatctggtgctgacagtgctgattgccctggccgtgtacttcctgggtagactggtgcctagaggaagaggcgctgccgaagccgccacaagaaagcagagaatcaccgagacagagagcccctaccaagagctgcaaggccagagaagcgacgtgtacagcgacctgaatacccagtggcggcggaagcggaaagagaagcagtctgagacaagccccaaagagttcctgaccatctacgaggacgtgaaggacctgaaaacccggcggaaccacgaacaagagcagacctttcctggcggaggcagcaccatctacagcatgatccagagccagagcagcgcccctacaagccaagagcctgcctacacactgtactccctgatccagcctagcagaaagagcggcagccggaagagaaatcacagccccagcttcaacagcacgatctacgaagtgatcggcaagagccagccaaaggctcagaaccctgccagactgagccggaaagagctggaaaacttcgacgtgtacagccggccttactacaaataa

SEQ ID NO: 9585 - DNA, 2763 bp, Artificial Sequence
  Synthetic Polynucleotide
atggccttaccagtgaccgccttgctcctgccgctggccttgctgctccacgccgccaggccggaattcgaagccgacatctaccagacacctagatacctggtcatcggcaccggcaagaaaatcaccctggaatgcagccagacaatgggccacgacaagatgtactggtatcagcaggaccccggcatggaactgcacctgatccactacagctacggcgtgaacagcaccgagaagggcgatctgtctagcgagagcaccgtgtccagaatcagaaccgagcacttcccactgacactggaaagcgccagacctagccacaccagccagtacctgtgtgcctcttctgaggccagaggactggccgagttcaccgacacacagtatttcggccctggcaccagactgaccgttctcgaggacctgaagaacgtgttcccacctgaggtggccgtgttcgagcctagcgaggccgagatcagccacacccagaaagccaccctcgtgtgcctggctaccggcttctaccccgaccatgtggaactgtcttggtgggtcaacggcaaagaggtgcacagcggcgtgtctaccgacccccagccactgaaagaacagcccgccctgaacgacagccggtactgcctgagcagcagactgagagtgtccgccaccttctggcagaacccccggaaccacttcagatgccaggtgcagttctacggcctgagcgagaacgacgagtggacccaggacagagccaagcccgtgacccagatcgtgtctgccgaagcctggggcagagccgattgcggatcccaggctcagagcgattgcagctgtagcacagtgtctccaggcgtgctggccggaattgtgatgggcgatctggtgctgacagtgctgattgccctggccgtgtacttcctgggtagactggtgcctagaggaagaggcgctgccgaagccgccacaagaaagcagagaatcaccgagacagagagcccctaccaagagctgcaaggccagagaagcgacgtgtacagcgacctgaatacccagagagtgaagttcagcagaagcgccgacgcccctgcctaccagcagggacagaaccaactgtacaacgagctgaacctgggcagacgggaagagtacgacgtgctggacaagcggagaggcagggaccctgagatgggcggaaagccccagcggagaaagaacccccaggaaggactgtataacgaactccagaaagacaagatggccgaagcctacagcgagatcggcatgaagggcgagcggagaagaggcaagggccacgatggcctgtaccagggcctgagcaccgccaccaaggacacctatgacgccctgcacatgcaggccctgcctccaagaagggccaagcgatctggatctggagcaacaaacttctcactactcaaacaagcaggtgacgtggaggagaatcccgggcctactagtatggactggatttggcgcatccttttccttgtcggcgctgctaccggcgcgcattccttcgaagcccagaccgtgacacagagccagcctgagatgtctgtgcaagaggccgagacagtgaccctgagctgcacctacgataccagcgagagcgactactacctgttctggtacaagcagcctcctagccggcagatgatcctggtcatccggcaagaagcctataagcagcagaacgccaccgagaacagattcagcgtgaacttccagaaggccgccaagagcttcagcctgaagatcagcgatagccagctgggcgacgccgccatgtacttttgcgcttatagaagcgccgtgaacgcccggctgatgtttggagatggcacacagctggtggtcaagcccaacacgcgtatccagaaccctgatcctgccgtgtaccagctgcgggatagcaagagcagcgacaagagcgtgtgtctgttcaccgacttcgacagccagaccaacgtgtcccagagcaaggactccgacgtgtacatcaccgataagaccgtgctggacatgcggagcatggacttcaagagcaactccgccgtggcctggtccaacaagtccgatttcgcctgcgccaacgccttcaacaacagcattatccccgaggacacattcttcccaagccccgagagcagctgcggtaccacaacgccgggcgaaaggagttccttgccggccttttaccccggcacaagcggaagctgtagtgggtgtggaagcctcagcctcccacttcttgcgggcctcgtcgcggcagatgcagtagcttcacttcttattgtaggcgcggtatttctctgtgctcgaccaaggaggtcacccgctcaggaggatggtaaggtgtatataaatatgccaggacgcggaagctctagacgggttaagttttccagatccgcagacgcacccgcttaccaacaagggcagaaccaactctacaatgaacttaatttggggcggagggaagagtacgacgttctggacaaaaggaggggacgagatcccgagatgggcggaaagcctcagcgaaggaagaatccgcaagaggggctttataacgaactccagaaagataaaatggcagaagcctatagtgagattgggatgaagggagaaaggaggaggggtaaaggtcacgatgggttgtaccaaggattgagcacagccactaaagatacctatgatgcgctccacatgcaggccctgccgccaagataa

SEQ ID NO: 9586 - DNA, 2541 bp, Artificial Sequence
  Synthetic Polynucleotide
atggccttaccagtgaccgccttgctcctgccgctggccttgctgctccacgccgccaggccggaattcgaagccgacatctaccagacacctagatacctggtcatcggcaccggcaagaaaatcaccctggaatgcagccagacaatgggccacgacaagatgtactggtatcagcaggaccccggcatggaactgcacctgatccactacagctacggcgtgaacagcaccgagaagggcgatctgtctagcgagagcaccgtgtccagaatcagaaccgagcacttcccactgacactggaaagcgccagacctagccacaccagccagtacctgtgtgcctcttctgaggccagaggactggccgagttcaccgacacacagtatttcggccctggcaccagactgaccgttctcgaggacctgaagaacgtgttcccacctgaggtggccgtgttcgagcctagcgaggccgagatcagccacacccagaaagccaccctcgtgtgcctggctaccggcttctaccccgaccatgtggaactgtcttggtgggtcaacggcaaagaggtgcacagcggcgtgtctaccgacccccagccactgaaagaacagcccgccctgaacgacagccggtactgcctgagcagcagactgagagtgtccgccaccttctggcagaacccccggaaccacttcagatgccaggtgcagttctacggcctgagcgagaacgacgagtggacccaggacagagccaagcccgtgacccagatcgtgtctgccgaagcctggggcagagccgattgcggatcccaggctcagagcgattgcagctgtagcacagtgtctccaggcgtgctggccggaattgtgatgggcgatctggtgctgacagtgctgattgccctggccgtgtacttcctgggtagactggtgcctagaggaagaggcgctgccgaagccgccacaagaaagcagagaatcaccgagacagagagcccctaccaagagctgcaaggccagagaagcgacgtgtacagcgacctgaatacccagagagtgaagttcagcagaagcgccgacgcccctgcctaccagcagggacagaaccaactgtacaacgagctgaacctgggcagacgggaagagtacgacgtgctggacaagcggagaggcagggaccctgagatgggcggaaagccccagcggagaaagaacccccaggaaggactgtataacgaactccagaaagacaagatggccgaagcctacagcgagatcggcatgaagggcgagcggagaagaggcaagggccacgatggcctgtaccagggcctgagcaccgccaccaaggacacctatgacgccctgcacatgcaggccctgcctccaagaagggccaagcgatctggatctggagcaacaaacttctcactactcaaacaagcaggtgacgtggaggagaatcccgggcctactagtatggactggatttggcgcatccttttccttgtcggcgctgctaccggcgcgcattccttcgaagcccagaccgtgacacagagccagcctgagatgtctgtgcaagaggccgagacagtgaccctgagctgcacctacgataccagcgagagcgactactacctgttctggtacaagcagcctcctagccggcagatgatcctggtcatccggcaagaagcctataagcagcagaacgccaccgagaacagattcagcgtgaacttccagaaggccgccaagagcttcagcctgaagatcagcgatagccagctgggcgacgccgccatgtacttttgcgcttatagaagcgccgtgaacgcccggctgatgtttggagatggcacacagctggtggtcaagcccaacacgcgtatccagaaccctgatcctgccgtgtaccagctgcgggatagcaagagcagcgacaagagcgtgtgtctgttcaccgacttcgacagccagaccaacgtgtcccagagcaaggactccgacgtgtacatcaccgataagaccgtgctggacatgcggagcatggacttcaagagcaactccgccgtggcctggtccaacaagtccgatttcgcctgcgccaacgccttcaacaacagcattatccccgaggacacattcttcccaagccccgagagcagctgcggtaccacaacgccgggcgaaaggagttccttgccggccttttaccccggcacaagcggaagctgtagtgggtgtggaagcctcagcctcccacttcttgcgggcctcgtcgcggcagatgcagtagcttcacttcttattgtaggcgcggtatttaagagaggccggaagaagctgctgtacatcttcaagcagcctttcatgcggcccgtgcagaccacccaggaagaggacggctgctcctgccggttccccgaggaagaagaaggcggctgcgagctgctctgtgctcgaccaaggaggtcacccgctcaggaggatggtaaggtgtatataaatatgccaggacgcggataa

SEQ ID NO: 9587 - DNA, 2538 bp, Artificial Sequence
  Synthetic Polynucleotide
atggccttaccagtgaccgccttgctcctgccgctggccttgctgctccacgccgccaggccggaattcgaagccgacatctaccagacacctagatacctggtcatcggcaccggcaagaaaatcaccctggaatgcagccagacaatgggccacgacaagatgtactggtatcagcaggaccccggcatggaactgcacctgatccactacagctacggcgtgaacagcaccgagaagggcgatctgtctagcgagagcaccgtgtccagaatcagaaccgagcacttcccactgacactggaaagcgccagacctagccacaccagccagtacctgtgtgcctcttctgaggccagaggactggccgagttcaccgacacacagtatttcggccctggcaccagactgaccgttctcgaggacctgaagaacgtgttcccacctgaggtggccgtgttcgagcctagcgaggccgagatcagccacacccagaaagccaccctcgtgtgcctggctaccggcttctaccccgaccatgtggaactgtcttggtgggtcaacggcaaagaggtgcacagcggcgtgtctaccgacccccagccactgaaagaacagcccgccctgaacgacagccggtactgcctgagcagcagactgagagtgtccgccaccttctggcagaacccccggaaccacttcagatgccaggtgcagttctacggcctgagcgagaacgacgagtggacccaggacagagccaagcccgtgacccagatcgtgtctgccgaagcctggggcagagccgattgcggatcccaggctcagagcgattgcagctgtagcacagtgtctccaggcgtgctggccggaattgtgatgggcgatctggtgctgacagtgctgattgccctggccgtgtacttcctgggtagactggtgcctagaggaagaggcgctgccgaagccgccacaagaaagcagagaatcaccgagacagagagcccctaccaagagctgcaaggccagagaagcgacgtgtacagcgacctgaatacccagagagtgaagttcagcagaagcgccgacgcccctgcctaccagcagggacagaaccaactgtacaacgagctgaacctgggcagacgggaagagtacgacgtgctggacaagcggagaggcagggaccctgagatgggcggaaagccccagcggagaaagaacccccaggaaggactgtataacgaactccagaaagacaagatggccgaagcctacagcgagatcggcatgaagggcgagcggagaagaggcaagggccacgatggcctgtaccagggcctgagcaccgccaccaaggacacctatgacgccctgcacatgcaggccctgcctccaagaagggccaagcgatctggatctggagcaacaaacttctcactactcaaacaagcaggtgacgtggaggagaatcccgggcctactagtatggactggatttggcgcatccttttccttgtcggcgctgctaccggcgcgcattccttcgaagcccagaccgtgacacagagccagcctgagatgtctgtgcaagaggccgagacagtgaccctgagctgcacctacgataccagcgagagcgactactacctgttctggtacaagcagcctcctagccggcagatgatcctggtcatccggcaagaagcctataagcagcagaacgccaccgagaacagattcagcgtgaacttccagaaggccgccaagagcttcagcctgaagatcagcgatagccagctgggcgacgccgccatgtacttttgcgcttatagaagcgccgtgaacgcccggctgatgtttggagatggcacacagctggtggtcaagcccaacacgcgtatccagaaccctgatcctgccgtgtaccagctgcgggatagcaagagcagcgacaagagcgtgtgtctgttcaccgacttcgacagccagaccaacgtgtcccagagcaaggactccgacgtgtacatcaccgataagaccgtgctggacatgcggagcatggacttcaagagcaactccgccgtggcctggtccaacaagtccgatttcgcctgcgccaacgccttcaacaacagcattatccccgaggacacattcttcccaagccccgagagcagctgcggtaccacaacgccgggcgaaaggagttccttgccggccttttaccccggcacaagcggaagctgtagtgggtgtggaagcctcagcctcccacttcttgcgggcctcgtcgcggcagatgcagtagcttcacttcttattgtaggcgcggtatttaggagcaagcggtcacggctgctccacagcgattacatgaatatgacaccacgaagaccgggtcctactcgcaaacactaccaaccctacgcacctccccgcgactttgcagcgtaccgatctctctgtgctcgaccaaggaggtcacccgctcaggaggatggtaaggtgtatataaatatgccaggacgcggataa

SEQ ID NO: 9588 - DNA, 3168 bp, Artificial Sequence
  Synthetic Polynucleotide
atggccttaccagtgaccgccttgctcctgccgctggccttgctgctccacgccgccaggccggaattcgaagccgacatctaccagacacctagatacctggtcatcggcaccggcaagaaaatcaccctggaatgcagccagacaatgggccacgacaagatgtactggtatcagcaggaccccggcatggaactgcacctgatccactacagctacggcgtgaacagcaccgagaagggcgatctgtctagcgagagcaccgtgtccagaatcagaaccgagcacttcccactgacactggaaagcgccagacctagccacaccagccagtacctgtgtgcctcttctgaggccagaggactggccgagttcaccgacacacagtatttcggccctggcaccagactgaccgttctcgaggacctgaagaacgtgttcccacctgaggtggccgtgttcgagcctagcgaggccgagatcagccacacccagaaagccaccctcgtgtgcctggctaccggcttctaccccgaccatgtggaactgtcttggtgggtcaacggcaaagaggtgcacagcggcgtgtctaccgacccccagccactgaaagaacagcccgccctgaacgacagccggtactgcctgagcagcagactgagagtgtccgccaccttctggcagaacccccggaaccacttcagatgccaggtgcagttctacggcctgagcgagaacgacgagtggacccaggacagagccaagcccgtgacccagatcgtgtctgccgaagcctggggcagagccgattgcggatcccagagcttcggcctgctggaccccaagctgtgctacctgctggatggcatcctgttcatctacggcgtgatcctgaccgccctgttcctgagagtgaagttcagcagaagcgccgacgcccctgcctaccagcagggacagaaccaactgtacaacgagctgaacctgggcagacgggaagagtacgacgtgctggacaagcggagaggcagggaccctgagatgggcggaaagccccagcggagaaagaacccccaggaaggactgtataacgaactccagaaagacaagatggccgaagcctacagcgagatcggcatgaagggcgagcggagaagaggcaagggccacgatggcctgtaccagggcctgagcaccgccaccaaggacacctatgacgccctgcacatgcaggccctgcctccaagaagggccaagcgatctggatctggagcaacaaacttctcactactcaaacaagcaggtgacgtggaggagaatcccgggcctactagtatggactggatttggcgcatccttttccttgtcggcgctgctaccggcgcgcattccttcgaagcccagaccgtgacacagagccagcctgagatgtctgtgcaagaggccgagacagtgaccctgagctgcacctacgataccagcgagagcgactactacctgttctggtacaagcagcctcctagccggcagatgatcctggtcatccggcaagaagcctataagcagcagaacgccaccgagaacagattcagcgtgaacttccagaaggccgccaagagcttcagcctgaagatcagcgatagccagctgggcgacgccgccatgtacttttgcgcttatagaagcgccgtgaacgcccggctgatgtttggagatggcacacagctggtggtcaagcccaacacgcgtatccagaaccctgatcctgccgtgtaccagctgcgggatagcaagagcagcgacaagagcgtgtgtctgttcaccgacttcgacagccagaccaacgtgtcccagagcaaggactccgacgtgtacatcaccgataagaccgtgctggacatgcggagcatggacttcaagagcaactccgccgtggcctggtccaacaagtccgatttcgcctgcgccaacgccttcaacaacagcattatccccgaggacacattcttcccaagccccgagagcagctgcggtacccagagttttgggttgttggaccctaaattgtgctatctgttggacggaatcctgttcatttacggagtgatcctgaccgcattgttcctgcgggttaagttttccagatccgcagacgcacccgcttaccaacaagggcagaaccaactctacaatgaacttaatttggggcggagggaagagtacgacgttctggacaaaaggaggggacgagatcccgagatgggcggaaagcctcagcgaaggaagaatccgcaagaggggctttataacgaactccagaaagataaaatggcagaagcctatagtgagattgggatgaagggagaaaggaggaggggtaaaggtcacgatgggttgtaccaaggattgagcacagccactaaagatacctatgatgcgctccacatgcaggccctgccgccaagacgcgccaagagaagcggatctggcgtgaagcagaccctgaatttcgacctgctgaagctggctggcgacgtggaatccaacccaggcccttctagaggccatatgaccgagtacaagcccacggtgcgcctcgccacccgcgacgacgtccccagggccgtacgcaccctcgccgccgcgttcgccgactaccccgccacgcgccacaccgtcgatccggaccgccacatcgagcgggtcaccgagctgcaagaactcttcctcacgcgcgtcgggctcgacatcggcaaggtgtgggtcgcggacgacggcgccgcggtggcggtctggaccacgccggagagcgtcgaagcgggggcggtgttcgccgagatcggcccgcgcatggccgagttgagcggttcccggctggccgcgcagcaacagatggaaggcctcctggcgccgcaccggcccaaggagcccgcgtggttcctggccaccgtcggcgtctcgcccgaccaccagggcaagggtctgggcagcgccgtcgtgctccccggagtggaggcggccgagcgcgccggggtgcccgccttcctggagacctccgcgccccgcaacctccccttctacgagcggctcggcttcaccgtcaccgccgacgtcgaggtgcccgaaggaccgcgcacctggtgcatgacccgcaagcccggtgcctga

SEQ ID NO: 9589 - DNA, 2496 bp, Artificial Sequence
  Synthetic Polynucleotide
atggccttaccagtgaccgccttgctcctgccgctggccttgctgctccacgccgccaggccggaattcgaagccgacatctaccagacacctagatacctggtcatcggcaccggcaagaaaatcaccctggaatgcagccagacaatgggccacgacaagatgtactggtatcagcaggaccccggcatggaactgcacctgatccactacagctacggcgtgaacagcaccgagaagggcgatctgtctagcgagagcaccgtgtccagaatcagaaccgagcacttcccactgacactggaaagcgccagacctagccacaccagccagtacctgtgtgcctcttctgaggccagaggactggccgagttcaccgacacacagtatttcggccctggcaccagactgaccgttctcgaggacctgaagaacgtgttcccacctgaggtggccgtgttcgagcctagcgaggccgagatcagccacacccagaaagccaccctcgtgtgcctggctaccggcttctaccccgaccatgtggaactgtcttggtgggtcaacggcaaagaggtgcacagcggcgtgtctaccgacccccagccactgaaagaacagcccgccctgaacgacagccggtactgcctgagcagcagactgagagtgtccgccaccttctggcagaacccccggaaccacttcagatgccaggtgcagttctacggcctgagcgagaacgacgagtggacccaggacagagccaagcccgtgacccagatcgtgtctgccgaagcctggggcagagccgattgcggatcccagagcttcggcctgctggaccccaagctgtgctacctgctggatggcatcctgttcatctacggcgtgatcctgaccgccctgttcctgagagtgaagttcagcagaagcgccgacgcccctgcctaccagcagggacagaaccaactgtacaacgagctgaacctgggcagacgggaagagtacgacgtgctggacaagcggagaggcagggaccctgagatgggcggaaagccccagcggagaaagaacccccaggaaggactgtataacgaactccagaaagacaagatggccgaagcctacagcgagatcggcatgaagggcgagcggagaagaggcaagggccacgatggcctgtaccagggcctgagcaccgccaccaaggacacctatgacgccctgcacatgcaggccctgcctccaagaagggccaagcgatctggatctggagcaacaaacttctcactactcaaacaagcaggtgacgtggaggagaatcccgggcctactagtatggactggatttggcgcatccttttccttgtcggcgctgctaccggcgcgcattccttcgaagcccagaccgtgacacagagccagcctgagatgtctgtgcaagaggccgagacagtgaccctgagctgcacctacgataccagcgagagcgactactacctgttctggtacaagcagcctcctagccggcagatgatcctggtcatccggcaagaagcctataagcagcagaacgccaccgagaacagattcagcgtgaacttccagaaggccgccaagagcttcagcctgaagatcagcgatagccagctgggcgacgccgccatgtacttttgcgcttatagaagcgccgtgaacgcccggctgatgtttggagatggcacacagctggtggtcaagcccaacacgcgtgcctctacaaagggaccctccgtgtttcctctggctcccagcagcaagtctacaagcggaggaacagccgctctgggctgcctggtcaaggattactttcccgagcctgtgaccgtgtcctggaatagcggagcactgacaagcggcgtgcacacctttccagccgtgctgcaaagcagcggcctgtactctctgagcagcgtggtcacagtgcctagctctagcctgggcacccagacctacatctgcaatgtgaaccacaagcctagcaacaccaaggtggacaagagagtggaacccaagagctgtggtacccagagttttgggttgttggaccctaaattgagctatctgttggacggaatcctgttcatttacggagtgatcctgaccgcattgttcctgcgggttaagttttccagatccgcagacgcacccgcttaccaacaagggcagaaccaactctacaatgaacttaatttggggcggagggaagagtacgacgttctggacaaaaggaggggacgagatcccgagatgggcggaaagcctcagcgaaggaagaatccgcaagaggggctttataacgaactccagaaagataaaatggcagaagcctatagtgagattgggatgaagggagaaaggaggaggggtaaaggtcacgatgggttgtaccaaggattgagcacagccactaaagatacctatgatgcgctccacatgcaggccctgccgccaagataa

SEQ ID NO: 9590 - DNA, 2496 bp, Artificial Sequence; identical to SEQ ID NO: 9589
  Synthetic Polynucleotide

SEQ ID NO: 9591 - DNA, 2496 bp, Artificial Sequence; identical to SEQ ID NO: 9589
  Synthetic Polynucleotide

SEQ ID NO: 9592 - DNA, 2469 bp, Artificial Sequence
  Synthetic Polynucleotide
atggccttaccagtgaccgccttgctcctgccgctggccttgctgctccacgccgccaggccggaattcgaagccgacatctaccagacacctagatacctggtcatcggcaccggcaagaaaatcaccctggaatgcagccagacaatgggccacgacaagatgtactggtatcagcaggaccccggcatggaactgcacctgatccactacagctacggcgtgaacagcaccgagaagggcgatctgtctagcgagagcaccgtgtccagaatcagaaccgagcacttcccactgacactggaaagcgccagacctagccacaccagccagtacctgtgtgcctcttctgaggccagaggactggccgagttcaccgacacacagtatttcggccctggcaccagactgaccgttctcgaggacctgaagaacgtgttcccacctgaggtggccgtgttcgagcctagcgaggccgagatcagccacacccagaaagccaccctcgtgtgcctggctaccggcttctaccccgaccatgtggaactgtcttggtgggtcaacggcaaagaggtgcacagcggcgtgtctaccgacccccagccactgaaagaacagcccgccctgaacgacagccggtactgcctgagcagcagactgagagtgtccgccaccttctggcagaacccccggaaccacttcagatgccaggtgcagttctacggcctgagcgagaacgacgagtggacccaggacagagccaagcccgtgacccagatcgtgtctgccgaagcctggggcagagccgattgcggatcccagagcttcggcctgctggaccccaagctgtgctacctgctggatggcatcctgttcatctacggcgtgatcctgaccgccctgttcctgagagtgaagttcagcagaagcgccgacgcccctgcctaccagcagggacagaaccaactgtacaacgagctgaacctgggcagacgggaagagtacgacgtgctggacaagcggagaggcagggaccctgagatgggcggaaagccccagcggagaaagaacccccaggaaggactgtataacgaactccagaaagacaagatggccgaagcctacagcgagatcggcatgaagggcgagcggagaagaggcaagggccacgatggcctgtaccagggcctgagcaccgccaccaaggacacctatgacgccctgcacatgcaggccctgcctccaagaagggccaagcgatctggatctggagcaacaaacttctcactactcaaacaagcaggtgacgtggaggagaatcccgggcctactagtatggactggatttggcgcatccttttccttgtcggcgctgctaccggcgcgcattccttcgaagcccagaccgtgacacagagccagcctgagatgtctgtgcaagaggccgagacagtgaccctgagctgcacctacgataccagcgagagcgactactacctgttctggtacaagcagcctcctagccggcagatgatcctggtcatccggcaagaagcctataagcagcagaacgccaccgagaacagattcagcgtgaacttccagaaggccgccaagagcttcagcctgaagatcagcgatagccagctgggcgacgccgccatgtacttttgcgcttatagaagcgccgtgaacgcccggctgatgtttggagatggcacacagctggtggtcaagcccaacacgcgtatccagaaccctgatcctgccgtgtaccagctgcgggatagcaagagcagcgacaagagcgtgtgtctgttcaccgacttcgacagccagaccaacgtgtcccagagcaaggactccgacgtgtacatcaccgataagaccgtgctggacatgcggagcatggacttcaagagcaactccgccgtggcctggtccaacaagtccgatttcgcctgcgccaacgccttcaacaacagcattatccccgaggacacattcttcccaagccccgagagcagctgcggtacccagagttttgggttgttggaccctaaattgagctatctgttggacggaatcctgttcatttacggagtgatcctgaccgcattgttcctgcgggttaagttttccagatccgcagacgcacccgcttaccaacaagggcagaaccaactctacaatgaacttaatttggggcggagggaagagtacgacgttctggacaaaaggaggggacgagatcccgagatgggcggaaagcctcagcgaaggaagaatccgcaagaggggctttataacgaactccagaaagataaaatggcagaagcctatagtgagattgggatgaagggagaaaggaggaggggtaaaggtcacgatgggttgtaccaaggattgagcacagccactaaagatacctatgatgcgctccacatgcaggccctgccgccaagataa

SEQ ID NO: 9593 - DNA, 2871 bp, Artificial Sequence
  Synthetic Polynucleotide
atggccttaccagtgaccgccttgctcctgccgctggccttgctgctccacgccgccaggccggaattcgaagccgacatctaccagacacctagatacctggtcatcggcaccggcaagaaaatcaccctggaatgcagccagacaatgggccacgacaagatgtactggtatcagcaggaccccggcatggaactgcacctgatccactacagctacggcgtgaacagcaccgagaagggcgatctgtctagcgagagcaccgtgtccagaatcagaaccgagcacttcccactgacactggaaagcgccagacctagccacaccagccagtacctgtgtgcctcttctgaggccagaggactggccgagttcaccgacacacagtatttcggccctggcaccagactgaccgttctcgagggacagcctaaggccaatcctaccgtgacactgttccctccaagcagcgaagaactccaggccaacaaggccacacttgtgtgcctgatctccgacttctaccctggggctgtgacagtggcttggaaggccgatggatctcctgtgaaagccggcgtggaaaccaccaagccatccaagcagagcaacaacaaatacgccgccagctcctacctgagcctgacacctgagcagtggaagtcccacagatcctacagctgccaagtgacccacgaaggcagcaccgtggaaaagacagtggcccctacagagtgcagcggatccctgggagagcctcagctgtgctatatcctggacgccatcctgtttctgtacggcatcgtgctgaccctgctgtactgccggctgaagatccaagtgcggaaggccgccatcaccagctacgagaaatccgacggcgtgtacaccggcctgagcaccagaaatcaagagacatacgagacactgaagcacgaaaagcctccacaaagggccaagcgatctggatctggagcaacaaacttctcactactcaaacaagcaggtgacgtggaggagaatcccgggcctactagtatggactggatttggcgcatccttttccttgtcggcgctgctaccggcgcgcattccttcgaagcccagaccgtgacacagagccagcctgagatgtctgtgcaagaggccgagacagtgaccctgagctgcacctacgataccagcgagagcgactactacctgttctggtacaagcagcctcctagccggcagatgatcctggtcatccggcaagaagcctataagcagcagaacgccaccgagaacagattcagcgtgaacttccagaaggccgccaagagcttcagcctgaagatcagcgatagccagctgggcgacgccgccatgtacttttgcgcttatagaagcgccgtgaacgcccggctgatgtttggagatggcacacagctggtggtcaagcccaacacgcgtatccagaaccctgatcctgccgtgtaccagctgcgggatagcaagagcagcgacaagagcgtgtgtctgttcaccgacttcgacagccagaccaacgtgtcccagagcaaggactccgacgtgtacatcaccgataagaccgtgctggacatgcggagcatggacttcaagagcaactccgccgtggcctggtccaacaagtccgatttcgcctgcgccaacgccttcaacaacagcattatccccgaggacacattcttcccaagccccgagagcagctgcggtacccagagttttgggttgttggaccctaaattgtgctatctgttggacggaatcctgttcatttacggagtgatcctgaccgcattgttcctgcgggttaagttttccagatccgcagacgcacccgcttaccaacaagggcagaaccaactctacaatgaacttaatttggggcggagggaagagtacgacgttctggacaaaaggaggggacgagatcccgagatgggcggaaagcctcagcgaaggaagaatccgcaagaggggctttataacgaactccagaaagataaaatggcagaagcctatagtgagattgggatgaagggagaaaggaggaggggtaaaggtcacgatgggttgtaccaaggattgagcacagccactaaagatacctatgatgcgctccacatgcaggccctgccgccaagacgcgccaagagaagcggatctggcgtgaagcagaccctgaatttcgacctgctgaagctggctggcgacgtggaatccaacccaggcccttctagaggccatatgaccgagtacaagcccacggtgcgcctcgccacccgcgacgacgtccccagggccgtacgcaccctcgccgccgcgttcgccgactaccccgccacgcgccacaccgtcgatccggaccgccacatcgagcgggtcaccgagctgcaagaactcttcctcacgcgcgtcgggctcgacatcggcaaggtgtgggtcgcggacgacggcgccgcggtggcggtctggaccacgccggagagcgtcgaagcgggggcggtgttcgccgagatcggcccgcgcatggccgagttgagcggttcccggctggccgcgcagcaacagatggaaggcctcctggcgccgcaccggcccaaggagcccgcgtggttcctggccaccgtcggcgtctcgcccgaccaccagggcaagggtctgggcagcgccgtcgtgctccccggagtggaggcggccgagcgcgccggggtgcccgccttcctggagacctccgcgccccgcaacctccccttctacgagcggctcggcttcaccgtcaccgccgacgtcgaggtgcccgaaggaccgcgcacctggtgcatgacccgcaagcccggtgcctga

SEQ ID NO: 9594 - DNA, 2271 bp, Artificial Sequence
  Synthetic Polynucleotide
atggccttaccagtgaccgccttgctcctgccgctggccttgctgctccacgccgccaggccggaattcgaagccgacatctaccagacacctagatacctggtcatcggcaccggcaagaaaatcaccctggaatgcagccagacaatgggccacgacaagatgtactggtatcagcaggaccccggcatggaactgcacctgatccactacagctacggcgtgaacagcaccgagaagggcgatctgtctagcgagagcaccgtgtccagaatcagaaccgagcacttcccactgacactggaaagcgccagacctagccacaccagccagtacctgtgtgcctcttctgaggccagaggactggccgagttcaccgacacacagtatttcggccctggcaccagactgaccgttctcgaggacctgaagaacgtgttcccacctgaggtggccgtgttcgagcctagcgaggccgagatcagccacacccagaaagccaccctcgtgtgcctggctaccggcttctaccccgaccatgtggaactgtcttggtgggtcaacggcaaagaggtgcacagcggcgtgtctaccgacccccagccactgaaagaacagcccgccctgaacgacagccggtactgcctgagcagcagactgagagtgtccgccaccttctggcagaacccccggaaccacttcagatgccaggtgcagttctacggcctgagcgagaacgacgagtggacccaggacagagccaagcccgtgacccagatcgtgtctgccgaagcctggggcagagccgattgcggatcccagagcttcggcctgctggaccccaagctgtgctacctgctggatggcatcctgttcatctacggcgtgatcctgaccgccctgttcctgagagtgaagttcagcagaagcgccgacgcccctgcctaccagcagggacagaaccaactgtacaacgagctgaacctgggcagacgggaagagtacgacgtgctggacaagcggagaggcagggaccctgagatgggcggaaagccccagcggagaaagaacccccaggaaggactgtataacgaactccagaaagacaagatggccgaagcctacagcgagatcggcatgaagggcgagcggagaagaggcaagggccacgatggcctgtaccagggcctgagcaccgccaccaaggacacctatgacgccctgcacatgcaggccctgcctccaagaagggccaagcgatctggatctggagcaacaaacttctcactactcaaacaagcaggtgacgtggaggagaatcccgggcctactagtatggactggatttggcgcatccttttccttgtcggcgctgctaccggcgcgcattccttcgaagcccagaccgtgacacagagccagcctgagatgtctgtgcaagaggccgagacagtgaccctgagctgcacctacgataccagcgagagcgactactacctgttctggtacaagcagcctcctagccggcagatgatcctggtcatccggcaagaagcctataagcagcagaacgccaccgagaacagattcagcgtgaacttccagaaggccgccaagagcttcagcctgaagatcagcgatagccagctgggcgacgccgccatgtacttttgcgcttatagaagcgccgtgaacgcccggctgatgtttggagatggcacacagctggtggtcaagcccaacacgcgtgcctctacaaagggaccctccgtgtttcctctggctcccagcagcaagtctacaagcggaggaacagccgctctgggctgcctggtcaaggattactttcccgagcctgtgaccgtgtcctggaatagcggagcactgacaagcggcgtgcacacctttccagccgtgctgcaaagcagcggcctgtactctctgagcagcgtggtcacagtgcctagctctagcctgggcacccagacctacatctgcaatgtgaaccacaagcctagcaacaccaaggtggacaagagagtggaacccaagagctgtggtaccctcggagaaccacagctctgttacattctggatgctatcctgttcctctatgggatcgtcctgacactcctgtattgcagactcaaaattcaagttcgcaaagccgccattacctcttacgagaagagtgatggggtgtacacaggactgtctacccggaatcaagaaacctacgaaaccctcaaacatgagaagccacctcagtaa

SEQ ID NO: 9595 - DNA, 2271 bp, Artificial Sequence; identical to SEQ ID NO: 9594
  Synthetic Polynucleotide

SEQ ID NO: 9596 - DNA, 2244 bp, Artificial Sequence
  Synthetic Polynucleotide
atggccttaccagtgaccgccttgctcctgccgctggccttgctgctccacgccgccaggccggaattcgaagccgacatctaccagacacctagatacctggtcatcggcaccggcaagaaaatcaccctggaatgcagccagacaatgggccacgacaagatgtactggtatcagcaggaccccggcatggaactgcacctgatccactacagctacggcgtgaacagcaccgagaagggcgatctgtctagcgagagcaccgtgtccagaatcagaaccgagcacttcccactgacactggaaagcgccagacctagccacaccagccagtacctgtgtgcctcttctgaggccagaggactggccgagttcaccgacacacagtatttcggccctggcaccagactgaccgttctcgaggacctgaagaacgtgttcccacctgaggtggccgtgttcgagcctagcgaggccgagatcagccacacccagaaagccaccctcgtgtgcctggctaccggcttctaccccgaccatgtggaactgtcttggtgggtcaacggcaaagaggtgcacagcggcgtgtctaccgacccccagccactgaaagaacagcccgccctgaacgacagccggtactgcctgagcagcagactgagagtgtccgccaccttctggcagaacccccggaaccacttcagatgccaggtgcagttctacggcctgagcgagaacgacgagtggacccaggacagagccaagcccgtgacccagatcgtgtctgccgaagcctggggcagagccgattgcggatcccagagcttcggcctgctggaccccaagctgtgctacctgctggatggcatcctgttcatctacggcgtgatcctgaccgccctgttcctgagagtgaagttcagcagaagcgccgacgcccctgcctaccagcagggacagaaccaactgtacaacgagctgaacctgggcagacgggaagagtacgacgtgctggacaagcggagaggcagggaccctgagatgggcggaaagccccagcggagaaagaacccccaggaaggactgtataacgaactccagaaagacaagatggccgaagcctacagcgagatcggcatgaagggcgagcggagaagaggcaagggccacgatggcctgtaccagggcctgagcaccgccaccaaggacacctatgacgccctgcacatgcaggccctgcctccaagaagggccaagcgatctggatctggagcaacaaacttctcactactcaaacaagcaggtgacgtggaggagaatcccgggcctactagtatggactggatttggcgcatccttttccttgtcggcgctgctaccggcgcgcattccttcgaagcccagaccgtgacacagagccagcctgagatgtctgtgcaagaggccgagacagtgaccctgagctgcacctacgataccagcgagagcgactactacctgttctggtacaagcagcctcctagccggcagatgatcctggtcatccggcaagaagcctataagcagcagaacgccaccgagaacagattcagcgtgaacttccagaaggccgccaagagcttcagcctgaagatcagcgatagccagctgggcgacgccgccatgtacttttgcgcttatagaagcgccgtgaacgcccggctgatgtttggagatggcacacagctggtggtcaagcccaacacgcgtatccagaaccctgatcctgccgtgtaccagctgcgggatagcaagagcagcgacaagagcgtgtgtctgttcaccgacttcgacagccagaccaacgtgtcccagagcaaggactccgacgtgtacatcaccgataagaccgtgctggacatgcggagcatggacttcaagagcaactccgccgtggcctggtccaacaagtccgatttcgcctgcgccaacgccttcaacaacagcattatccccgaggacacattcttcccaagccccgagagcagctgcggtaccctcggagaaccacagctctgttacattctggatgctatcctgttcctctatgggatcgtcctgacactcctgtattgcagactcaaaattcaagttcgcaaagccgccattacctcttacgagaagagtgatggggtgtacacaggactgtctacccggaatcaagaaacctacgaaaccctcaaacatgagaagccacctcagtaa

SEQ ID NO: 9597 - DNA, 2883 bp, Artificial Sequence
  Synthetic Polynucleotide
atggccttaccagtgaccgccttgctcctgccgctggccttgctgctccacgccgccaggccggaattcgaagccgacatctaccagacacctagatacctggtcatcggcaccggcaagaaaatcaccctggaatgcagccagacaatgggccacgacaagatgtactggtatcagcaggaccccggcatggaactgcacctgatccactacagctacggcgtgaacagcaccgagaagggcgatctgtctagcgagagcaccgtgtccagaatcagaaccgagcacttcccactgacactggaaagcgccagacctagccacaccagccagtacctgtgtgcctcttctgaggccagaggactggccgagttcaccgacacacagtatttcggccctggcaccagactgaccgttctcgagggacagcctaaggccaatcctaccgtgacactgttccctccaagcagcgaagaactccaggccaacaaggccacacttgtgtgcctgatctccgacttctaccctggggctgtgacagtggcttggaaggccgatggatctcctgtgaaagccggcgtggaaaccaccaagccatccaagcagagcaacaacaaatacgccgccagctcctacctgagcctgacacctgagcagtggaagtcccacagatcctacagctgccaagtgacccacgaaggcagcaccgtggaaaagacagtggcccctacagagtgcagcacaacacctggcgagagaagtagcctgcctgccttctatcctggcaccagcggctcttgttctggctgtggatctctgagcctgcctctgctggctggactggttgctgctgatgctgtggcctctctgctgattgtgggagccgtgttcctgtgcgccagacctagaagaagccccgctcaagaggacggcaaggtgtacatcaacatgcccggcagaggaagggccaagcgatctggatctggagcaacaaacttctcactactcaaacaagcaggtgacgtggaggagaatcccgggcctactagtatggactggatttggcgcatccttttccttgtcggcgctgctaccggcgcgcattccttcgaagcccagaccgtgacacagagccagcctgagatgtctgtgcaagaggccgagacagtgaccctgagctgcacctacgataccagcgagagcgactactacctgttctggtacaagcagcctcctagccggcagatgatcctggtcatccggcaagaagcctataagcagcagaacgccaccgagaacagattcagcgtgaacttccagaaggccgccaagagcttcagcctgaagatcagcgatagccagctgggcgacgccgccatgtacttttgcgcttatagaagcgccgtgaacgcccggctgatgtttggagatggcacacagctggtggtcaagcccaacacgcgtatccagaaccctgatcctgccgtgtaccagctgcgggatagcaagagcagcgacaagagcgtgtgtctgttcaccgacttcgacagccagaccaacgtgtcccagagcaaggactccgacgtgtacatcaccgataagaccgtgctggacatgcggagcatggacttcaagagcaactccgccgtggcctggtccaacaagtccgatttcgcctgcgccaacgccttcaacaacagcattatccccgaggacacattcttcccaagccccgagagcagctgcggtacccagagttttgggttgttggaccctaaattgtgctatctgttggacggaatcctgttcatttacggagtgatcctgaccgcattgttcctgcgggttaagttttccagatccgcagacgcacccgcttaccaacaagggcagaaccaactctacaatgaacttaatttggggcggagggaagagtacgacgttctggacaaaaggaggggacgagatcccgagatgggcggaaagcctcagcgaaggaagaatccgcaagaggggctttataacgaactccagaaagataaaatggcagaagcctatagtgagattgggatgaagggagaaaggaggaggggtaaaggtcacgatgggttgtaccaaggattgagcacagccactaaagatacctatgatgcgctccacatgcaggccctgccgccaagacgcgccaagagaagcggatctggcgtgaagcagaccctgaatttcgacctgctgaagctggctggcgacgtggaatccaacccaggcccttctagaggccatatgaccgagtacaagcccacggtgcgcctcgccacccgcgacgacgtccccagggccgtacgcaccctcgccgccgcgttcgccgactaccccgccacgcgccacaccgtcgatccggaccgccacatcgagcgggtcaccgagctgcaagaactcttcctcacgcgcgtcgggctcgacatcggcaaggtgtgggtcgcggacgacggcgccgcggtggcggtctggaccacgccggagagcgtcgaagcgggggcggtgttcgccgagatcggcccgcgcatggccgagttgagcggttcccggctggccgcgcagcaacagatggaaggcctcctggcgccgcaccggcccaaggagcccgcgtggttcctggccaccgtcggcgtctcgcccgaccaccagggcaagggtctgggcagcgccgtcgtgctccccggagtggaggcggccgagcgcgccggggtgcccgccttcctggagacctccgcgccccgcaacctccccttctacgagcggctcggcttcaccgtcaccgccgacgtcgaggtgcccgaaggaccgcgcacctggtgcatgacccgcaagcccggtgcctga

SEQ ID NO: 9598 - DNA, 2982 bp, Artificial Sequence
  Synthetic Polynucleotide
atggccttaccagtgaccgccttgctcctgccgctggccttgctgctccacgccgccaggccggaattcgaagccgacatctaccagacacctagatacctggtcatcggcaccggcaagaaaatcaccctggaatgcagccagacaatgggccacgacaagatgtactggtatcagcaggaccccggcatggaactgcacctgatccactacagctacggcgtgaacagcaccgagaagggcgatctgtctagcgagagcaccgtgtccagaatcagaaccgagcacttcccactgacactggaaagcgccagacctagccacaccagccagtacctgtgtgcctcttctgaggccagaggactggccgagttcaccgacacacagtatttcggccctggcaccagactgaccgttctcgaggacctgaagaacgtgttcccacctgaggtggccgtgttcgagcctagcgaggccgagatcagccacacccagaaagccaccctcgtgtgcctggctaccggcttctaccccgaccatgtggaactgtcttggtgggtcaacggcaaagaggtgcacagcggcgtgtctaccgacccccagccactgaaagaacagcccgccctgaacgacagccggtactgcctgagcagcagactgagagtgtccgccaccttctggcagaacccccggaaccacttcagatgccaggtgcagttctacggcctgagcgagaacgacgagtggacccaggacagagccaagcccgtgacccagatcgtgtctgccgaagcctggggcagagccgattgcggatcccagagcttcggcctgctggaccccaagctgtgctacctgctggatggcatcctgttcatctacggcgtgatcctgaccgccctgttcctgagagtgaagttcagcagaagcgccgacgcccctgcctaccagcagggacagaaccaactgtacaacgagctgaacctgggcagacgggaagagtacgacgtgctggacaagcggagaggcagggaccctgagatgggcggaaagccccagcggagaaagaacccccaggaaggactgtataacgaactccagaaagacaagatggccgaagcctacagcgagatcggcatgaagggcgagcggagaagaggcaagggccacgatggcctgtaccagggcctgagcaccgccaccaaggacacctatgacgccctgcacatgcaggccctgcctccaagaagggccaagcgatctggatctggagcaacaaacttctcactactcaaacaagcaggtgacgtggaggagaatcccgggcctactagtatggactggatttggcgcatccttttccttgtcggcgctgctaccggcgcgcattccttcgaagcccagaccgtgacacagagccagcctgagatgtctgtgcaagaggccgagacagtgaccctgagctgcacctacgataccagcgagagcgactactacctgttctggtacaagcagcctcctagccggcagatgatcctggtcatccggcaagaagcctataagcagcagaacgccaccgagaacagattcagcgtgaacttccagaaggccgccaagagcttcagcctgaagatcagcgatagccagctgggcgacgccgccatgtacttttgcgcttatagaagcgccgtgaacgcccggctgatgtttggagatggcacacagctggtggtcaagcccaacacgcgtgcctctacaaagggaccctccgtgtttcctctggctcccagcagcaagtctacaagcggaggaacagccgctctgggctgcctggtcaaggattactttcccgagcctgtgaccgtgtcctggaatagcggagcactgacaagcggcgtgcacacctttccagccgtgctgcaaagcagcggcctgtactctctgagcagcgtggtcacagtgcctagctctagcctgggcacccagacctacatctgcaatgtgaaccacaagcctagcaacaccaaggtggacaagagagtggaacccaagagctgtacaacgccgggcgaaaggagttccttgccggccttttaccccggcacaagcggaagctgtagtgggtgtggaagcctcagcctcccacttcttgcgggcctcgtcgcggcagatgcagtagcttcacttcttattgtaggcgcggtatttctctgtgctcgaccaaggaggtcacccgctcaggaggatggtaaggtgtatataaatatgccaggacgcggacgcgccaagagaagcggatctggcgtgaagcagaccctgaatttcgacctgctgaagctggctggcgacgtggaatccaacccaggcccttctagaggccatatgaccgagtacaagcccacggtgcgcctcgccacccgcgacgacgtccccagggccgtacgcaccctcgccgccgcgttcgccgactaccccgccacgcgccacaccgtcgatccggaccgccacatcgagcgggtcaccgagctgcaagaactcttcctcacgcgcgtcgggctcgacatcggcaaggtgtgggtcgcggacgacggcgccgcggtggcggtctggaccacgccggagagcgtcgaagcgggggcggtgttcgccgagatcggcccgcgcatggccgagttgagcggttcccggctggccgcgcagcaacagatggaaggcctcctggcgccgcaccggcccaaggagcccgcgtggttcctggccaccgtcggcgtctcgcccgaccaccagggcaagggtctgggcagcgccgtcgtgctccccggagtggaggcggccgagcgcgccggggtgcccgccttcctggagacctccgcgccccgcaacctccccttctacgagcggctcggcttcaccgtcaccgccgacgtcgaggtgcccgaaggaccgcgcacctggtgcatgacccgcaagcccggtgcctga

SEQ ID NO: 9599 - DNA, 2982 bp, Artificial Sequence; identical to SEQ ID NO: 9598
  Synthetic Polynucleotide

SEQ ID NO: 9600 - DNA, 3303 bp, Artificial Sequence
  Synthetic Polynucleotide
atggccttaccagtgaccgccttgctcctgccgctggccttgctgctccacgccgccaggccggaattcgaagccgacatctaccagacacctagatacctggtcatcggcaccggcaagaaaatcaccctggaatgcagccagacaatgggccacgacaagatgtactggtatcagcaggaccccggcatggaactgcacctgatccactacagctacggcgtgaacagcaccgagaagggcgatctgtctagcgagagcaccgtgtccagaatcagaaccgagcacttcccactgacactggaaagcgccagacctagccacaccagccagtacctgtgtgcctcttctgaggccagaggactggccgagttcaccgacacacagtatttcggccctggcaccagactgaccgttctcgaggacctgaagaacgtgttcccacctgaggtggccgtgttcgagcctagcgaggccgagatcagccacacccagaaagccaccctcgtgtgcctggctaccggcttctaccccgaccatgtggaactgtcttggtgggtcaacggcaaagaggtgcacagcggcgtgtctaccgacccccagccactgaaagaacagcccgccctgaacgacagccggtactgcctgagcagcagactgagagtgtccgccaccttctggcagaacccccggaaccacttcagatgccaggtgcagttctacggcctgagcgagaacgacgagtggacccaggacagagccaagcccgtgacccagatcgtgtctgccgaagcctggggcagagccgattgcggatccacaacacctggcgagagaagtagcctgcctgccttctatcctggcaccagcggctcttgttctggctgtggatctctgagcctgcctctgctggctggactggttgctgctgatgctgtggcctctctgctgattgtgggagccgtgttcctgtgcgccagacctagaagaagccccgctcaagaggacggcaaggtgtacatcaacatgcccggcagaggaagcactagtagagtgaagttcagcagaagcgccgacgcccctgcctaccagcagggacagaaccaactgtacaacgagctgaacctgggcagacgggaagagtacgacgtgctggacaagcggagaggcagggaccctgagatgggcggaaagccccagcggagaaagaacccccaggaaggactgtataacgaactccagaaagacaagatggccgaagcctacagcgagatcggcatgaagggcgagcggagaagaggcaagggccacgatggcctgtaccagggcctgagcaccgccaccaaggacacctatgacgccctgcacatgcaggccctgcctccaagaagggccaagcgatctggatctggagcaacaaacttctcactactcaaacaagcaggtgacgtggaggagaatcccgggcctatggactggatttggcgcatccttttccttgtcggcgctgctaccggcgcgcattccttcgaagcccagaccgtgacacagagccagcctgagatgtctgtgcaagaggccgagacagtgaccctgagctgcacctacgataccagcgagagcgactactacctgttctggtacaagcagcctcctagccggcagatgatcctggtcatccggcaagaagcctataagcagcagaacgccaccgagaacagattcagcgtgaacttccagaaggccgccaagagcttcagcctgaagatcagcgatagccagctgggcgacgccgccatgtacttttgcgcttatagaagcgccgtgaacgcccggctgatgtttggagatggcacacagctggtggtcaagcccaacacgcgtatccagaaccctgatcctgccgtgtaccagctgcgggatagcaagagcagcgacaagagcgtgtgtctgttcaccgacttcgacagccagaccaacgtgtcccagagcaaggactccgacgtgtacatcaccgataagaccgtgctggacatgcggagcatggacttcaagagcaactccgccgtggcctggtccaacaagtccgatttcgcctgcgccaacgccttcaacaacagcattatccccgaggacacattcttcccaagccccgagagcagctgcggtacccagagttttgggttgttggaccctaaattgtgctatctgttggacggaatcctgttcatttacggagtgatcctgaccgcattgttcctgcgggttaagttttccagatccgcagacgcacccgcttaccaacaagggcagaaccaactctacaatgaacttaatttggggcggagggaagagtacgacgttctggacaaaaggaggggacgagatcccgagatgggcggaaagcctcagcgaaggaagaatccgcaagaggggctttataacgaactccagaaagataaaatggcagaagcctatagtgagattgggatgaagggagaaaggaggaggggtaaaggtcacgatgggttgtaccaaggattgagcacagccactaaagatacctatgatgcgctccacatgcaggccctgccgccaagacgcgccaagagaagcggatctggcgtgaagcagaccctgaatttcgacctgctgaagctggctggcgacgtggaatccaacccaggcccttctagaggccatatgaccgagtacaagcccacggtgcgcctcgccacccgcgacgacgtccccagggccgtacgcaccctcgccgccgcgttcgccgactaccccgccacgcgccacaccgtcgatccggaccgccacatcgagcgggtcaccgagctgcaagaactcttcctcacgcgcgtcgggctcgacatcggcaaggtgtgggtcgcggacgacggcgccgcggtggcggtctggaccacgccggagagcgtcgaagcgggggcggtgttcgccgagatcggcccgcgcatggccgagttgagcggttcccggctggccgcgcagcaacagatggaaggcctcctggcgccgcaccggcccaaggagcccgcgtggttcctggccaccgtcggcgtctcgcccgaccaccagggcaagggtctgggcagcgccgtcgtgctccccggagtggaggcggccgagcgcgccggggtgcccgccttcctggagacctccgcgccccgcaacctccccttctacgagcggctcggcttcaccgtcaccgccgacgtcgaggtgcccgaaggaccgcgcacctggtgcatgacccgcaagcccggtgcctga

SEQ ID NO: 9601 - DNA, 2271 bp, Artificial Sequence
  Synthetic Polynucleotide
atggccttaccagtgaccgccttgctcctgccgctggccttgctgctccacgccgccaggccggctatccagaccaccgaccagggcgaagtgcccaatggctacaacgtgtccagaagcaccatcgaggacttcccaaagaagagagagcacttcagcctgatcctggacagcgccaagaccaaccagaccagcgtgtacttctgtgccagcagcagcaccaacaccgaggtgttctttggcaagggcaccagactgaccgtgctcgaggacaagcagctggacgccgacgtgtcccccaagcctaccatcttcctgccctctatcgccgagacaaagctccagaaggccggcacctacctgtgcctgctggaaaagttcttcccagatgtgattaagatccactggcaggaaaagaagtccaacaccatcctgggcagccaggaaggcaacaccatgaagaccaacgacacctacatgaagttcagctggctgaccgtgcccgagaagtccctggacaaagaacacagatgcatcgtgcggcacgaaaacaacaagaacggcgtggaccaggaaatcatcttcccacccatcaagaccgatgtgattacaggatcccagagcttcggcctgctggaccccaagctgtgctacctgctggatggcatcctgttcatctacggcgtgatcctgaccgccctgttcctgagagtgaagttcagcagaagcgccgacgcccctgcctaccagcagggacagaaccaactgtacaacgagctgaacctgggcagacgggaagagtacgacgtgctggacaagcggagaggcagggaccctgagatgggcggaaagccccagcggagaaagaacccccaggaaggactgtataacgaactccagaaagacaagatggccgaagcctacagcgagatcggcatgaagggcgagcggagaagaggcaagggccacgatggcctgtaccagggcctgagcaccgccaccaaggacacctatgacgccctgcacatgcaggccctgcctccaagaagggccaagcgatctggatctggagcaacaaacttctcactactcaaacaagcaggtgacgtggaggagaatcccgggcctactagtatggactggatttggcgcatccttttccttgtcggcgctgctaccggcgcgcattccttcgaagctggacatctggaacagccccagatcagcagcaccaagacactgagcaagaccgccagactggaatgcgtggtgtccggcatcacaatcagcgccacaagcgtgtactggtacagagaaagacccggcgaagtgatccagttcctggtgtccatcagctacgatggcaccgtgcggaaagagagcggcatcccttctggcaagttcgaggtggacagaatccccgagacaagcaccagcacactgaccatccacaacgtggaaaagcaggacattgccacctactactgcgccctgtgggaagcccaacaagagctgggcaagaaaatcaaggtgttcggccctggcaccaagctgattatcaccgacaagcagctgacgcgtagccagcctcacaccaagcccagcgtgttcgtgatgaagaacggcaccaacgtggcctgcctcgtgaaagagttctaccccaaggacatcaggatcaacctggtgtccagcaagaagatcaccgagttcgaccccgccatcgtgatctcccccagcggcaagtacaacgccgtgaagctggggaagtacgaggacagcaacagcgtgacctgctccgtgcagcacgacaacaagaccgtgcacagcaccgactttggtacccagagttttgggttgttggaccctaaattgtgctatctgttggacggaatcctgttcatttacggagtgatcctgaccgcattgttcctgcgggttaagttttccagatccgcagacgcacccgcttaccaacaagggcagaaccaactctacaatgaacttaatttggggcggagggaagagtacgacgttctggacaaaaggaggggacgagatcccgagatgggcggaaagcctcagcgaaggaagaatccgcaagaggggctttataacgaactccagaaagataaaatggcagaagcctatagtgagattgggatgaagggagaaaggaggaggggtaaaggtcacgatgggttgtaccaaggattgagcacagccactaaagatacctatgatgcgctccacatgcaggccctgccgccaaga

SEQ ID NO: 9602 - DNA, 2271 bp, Artificial Sequence
  Synthetic Polynucleotide
atggccttaccagtgaccgccttgctcctgccgctggccttgctgctccacgccgccaggccggctggacatctggaacagccccagatcagcagcaccaagacactgagcaagaccgccagactggaatgcgtggtgtccggcatcacaatcagcgccacaagcgtgtactggtacagagaaagacccggcgaagtgatccagttcctggtgtccatcagctacgatggcaccgtgcggaaagagagcggcatcccttctggcaagttcgaggtggacagaatccccgagacaagcaccagcacactgaccatccacaacgtggaaaagcaggacattgccacctactactgcgccctgtgggaagcccaacaagagctgggcaagaaaatcaaggtgttcggccctggcaccaagctgattatcaccgacaagcagctgctcgaggacaagcagctggacgccgacgtgtcccccaagcctaccatcttcctgccctctatcgccgagacaaagctccagaaggccggcacctacctgtgcctgctggaaaagttcttcccagatgtgattaagatccactggcaggaaaagaagtccaacaccatcctgggcagccaggaaggcaacaccatgaagaccaacgacacctacatgaagttcagctggctgaccgtgcccgagaagtccctggacaaagaacacagatgcatcgtgcggcacgaaaacaacaagaacggcgtggaccaggaaatcatcttcccacccatcaagaccgatgtgattacaggatcccagagcttcggcctgctggaccccaagctgtgctacctgctggatggcatcctgttcatctacggcgtgatcctgaccgccctgttcctgagagtgaagttcagcagaagcgccgacgcccctgcctaccagcagggacagaaccaactgtacaacgagctgaacctgggcagacgggaagagtacgacgtgctggacaagcggagaggcagggaccctgagatgggcggaaagccccagcggagaaagaacccccaggaaggactgtataacgaactccagaaagacaagatggccgaagcctacagcgagatcggcatgaagggcgagcggagaagaggcaagggccacgatggcctgtaccagggcctgagcaccgccaccaaggacacctatgacgccctgcacatgcaggccctgcctccaagaagggccaagcgatctggatctggagcaacaaacttctcactactcaaacaagcaggtgacgtggaggagaatcccgggcctactagtatggactggatttggcgcatccttttccttgtcggcgctgctaccggcgcgcattccttcgaagctatccagaccaccgaccagggcgaagtgcccaatggctacaacgtgtccagaagcaccatcgaggacttcccaaagaagagagagcacttcagcctgatcctggacagcgccaagaccaaccagaccagcgtgtacttctgtgccagcagcagcaccaacaccgaggtgttctttggcaagggcaccagactgaccgtgacgcgtagccagcctcacaccaagcccagcgtgttcgtgatgaagaacggcaccaacgtggcctgcctcgtgaaagagttctaccccaaggacatcaggatcaacctggtgtccagcaagaagatcaccgagttcgaccccgccatcgtgatctcccccagcggcaagtacaacgccgtgaagctggggaagtacgaggacagcaacagcgtgacctgctccgtgcagcacgacaacaagaccgtgcacagcaccgactttggtacccagagttttgggttgttggaccctaaattgtgctatctgttggacggaatcctgttcatttacggagtgatcctgaccgcattgttcctgcgggttaagttttccagatccgcagacgcacccgcttaccaacaagggcagaaccaactctacaatgaacttaatttggggcggagggaagagtacgacgttctggacaaaaggaggggacgagatcccgagatgggcggaaagcctcagcgaaggaagaatccgcaagaggggctttataacgaactccagaaagataaaatggcagaagcctatagtgagattgggatgaagggagaaaggaggaggggtaaaggtcacgatgggttgtaccaaggattgagcacagccactaaagatacctatgatgcgctccacatgcaggccctgccgccaaga

SEQ ID NO: 9603 - protein, 12 aa, -Artificial-Sequence
GGGGGGGGGGGG

SEQ ID NO: 9604 - protein, 12 aa, -Artificial-Sequence
GGGGGGGGGGGG

SEQ ID NO: 9605 - protein, 12 aa, -Artificial-Sequence
GGGGGGGGGGGG

SEQ ID NO: 9606 - protein, 114 aa, -Artificial-Sequence
QEVTQIPAALSVPEGENLVLNCSFTDSAIYNLQWFRQDPGKGLTSLLLISPWQREQTSGRLNASLDKSSGRSTLYIAASQPGDSATYLCAVRPLLDGTYIPTFGRGTSLIVHPY

SEQ ID NO: 9607 - protein, 239 aa, -Artificial-Sequence
GVTQTPKFQVLKTGQSMTLQCAQDMNHEYMSWYRQDPGMGLRLIHYSVAIQTTDQGEVPNGYNVSRSTIEDFPLRLLSAAPSQTSVYFCASSYVGDTGELFFGEGSRLTVGGGGSGGGGSGGGGSQEVTQIPAALSVPEGENLVLNCSFTDSAIYNLQWFRQDPGKGLTSLLLISPWQREQTSGRLNASLDKSSGRSTLYIAASQPGDSATYLCAVRPLLDGTYIPTFGRGTSLIVHPY

SEQ ID NO: 9608 - protein, 114 aa, -Artificial-Sequence
DGDSVTQTEGLVTLTEGLPVMLNCTYQTIYSNPFLFWYVQHLNESPRLLLKSFTDNKRTEHQGFHATLHKSSSSFHLQKSSAQLSDSALYYCAFDTNTYKVIFGKGTHLHVLPN

SEQ ID NO: 9609 - protein, 134 aa, -Artificial-Sequence
MGPVTCSVLVLLLMLRRSNGDGDSVTQTEGLVTLTEGLPVMLNCTYQTIYSNPFLFWYVQHLNESPRLLLKSFTDNKRTEHQGFHATLHKSSSSFHLQKSSAQLSDSALYYCAFDTNTYKVIFGKGTHLHVLPN

SEQ ID NO: 9610 - protein, 113 aa, -Artificial-Sequence
LVDMKVTQMPRYLIKRMGENVLLECGQDMSHETMYWYRQDPGLGLQLIYISYDVDSNSEGDIPKGYRVSRKKREHFSLILDSAKTNQTSVYFCASSSTNTEVFFGKGTRLTVL

SEQ ID NO: 9611 - protein, 130 aa, -Artificial-Sequence
MRVRLISAVVLCSLGTGLVDMKVTQMPRYLIKRMGENVLLECGQDMSHETMYWYRQDPGLGLQLIYISYDVDSNSEGDIPKGYRVSRKKREHFSLILDSAKTNQTSVYFCASSSTNTEVFFGKGTRLTVL

SEQ ID NO: 9612 - protein, 242 aa, -Artificial-Sequence
LVDMKVTQMPRYLIKRMGENVLLECGQDMSHETMYWYRQDPGLGLQLIYISYDVDSNSEGDIPKGYRVSRKKREHFSLILDSAKTNQTSVYFCASSSTNTEVFFGKGTRLTVLGGGGSGGGGSGGGGSDGDSVTQTEGLVTLTEGLPVMLNCTYQTIYSNPFLFWYVQHLNESPRLLLKSFTDNKRTEHQGFHATLHKSSSSFHLQKSSAQLSDSALYYCAFDTNTYKVIFGKGTHLHVLPN

SEQ ID NO: 9613 - protein, 117 aa, -Artificial-Sequence
GVTQSPTHLIKTRGQQATLRCSPISGHTSVYWYQQALGLGLQFLLWYDEGEERNRGNFPPRFSGRQFPNYSSELNVNALELEDSALYLCASSLGGDELGADGNEQFFGPGTRLTVLE

SEQ ID NO: 9614 - protein, 119 aa, -Artificial-Sequence
GVTQSPTHLIKTRGQQATLRCSPISGHTSVYWYQQALGLGLQFLLWYDEGEERNRGNFPPRFSGRQFPNYSSELNVNALELEDSALYLCASSLGGPRGLAGLRGDEQFFGPGTRLTVLE

SEQ ID NO: 9615 - protein, 431 aa, -Artificial-Sequence
MGSWFEFYDRLNAIDARLWALGGSEAELAAFEKEIAAFESELQAYKGKGNPEVENLRVHAAAIREWLQAYRHNGGGGSGGGGSGMGSWLEFYHRLNAIDSRLWALGGSEAELAAFEKEIAAFESELQAYKGKGNPEVESLRDHAAHIREWLQAYRHNGGGGSGGGGSGGSGGGGSGGGGSGGGGSFEDIQMTQSPSSLSASVGDRVTITCKASDHINNWLAWYQQKPGQAPKLLIYGATTLETGVPSRFSGSGSGTDYTLTISSLQPEDFATYYCQQSWNTPWTFGQGTKLEIKRGGGGSGGGGSGGGGSQVQLQQPGAELVKPGASVKMSCKASGYAFSSYWINWMKQKPGQGLEWIGQIYPGDGDTNYNGKFKGRATLTADTSSSTAYMQLSSLTSEDSAVYFCARSITTVVGCAMDYWGQGTSVTVSS

SEQ ID NO: 9616 - protein, 336 aa, -Artificial-Sequence
MGSWSEFWVRLGAIRERLDALGGSEAELAAFEKEIAAFESELQAYKGKGNPEVEKLRYTAATIRRFLQAYRHNGSGGGGSGGGGSGGGGSFEDIQMTQSPSSLSASVGDRVTITCKASDHINNWLAWYQQKPGQAPKLLIYGATTLETGVPSRFSGSGSGTDYTLTISSLQPEDFATYYCQQSWNTPWTFGQGTKLEIKRGGGGSGGGGSGGGGSQVQLQQPGAELVKPGASVKMSCKASGYAFSSYWINWMKQKPGQGLEWIGQIYPGDGDTNYNGKFKGRATLTADTSSSTAYMQLSSLTSEDSAVYFCARSITTVVGCAMDYWGQGTSVTVSS

SEQ ID NO: 9617 - protein, 440 aa, -Artificial-Sequence
MALPVTALLLPLALLLHAARPACDEGGGGSMGSWSEFWVRLGAIRERLDALGGSEAELAAFEKEIAAFESELQAYKGKGNPEVEKLRYTAATIRRFLQAYRHNGTGGGGSGGGGSGGGGSGLEKCFQTENPLECQDKGEEELQKYIQESQALAKRSCGLFQKLGEYYLQNAFLVAYTKKAPQLTSSELMAITRKMAATAATCCQLSEDKLLACGEGAADIIIGHLCIRHEMTPVNPGVGQCCTSSYANRRPCFSSLVVDETYVPPAFSDDKFIFHKDLCQAQGVALQTMKQEFLINLVKQKPQITEEQLEAVIADFSGLLEKCCQGQEQEVCFAEEGQKLISKTRAALGVGGGGSGGGGSGGGGSGPMGSWDEFGRRLYAIEWRLYALGGSEAELAAFEKEIAAFESELQAYKGKGNPEVEKLREIAAVIRSNLQAYRHN

SEQ ID NO: 9618 - protein, 73 aa, -Artificial-Sequence
MGSWEEFELRLNAIEERLYALGGSEAELAYFEYVIADFEGNLQRYKGKGNPEVEALYFEADAIFEELVAYRHN

SEQ ID NO: 9619 - protein, 136 aa, -Artificial-Sequence
CPYSNPSLCSGGGGSELPTQGTFSNVSTNVSPAKPTTTACPYSNPSLCSGGGGSPAPRPPTPAPTIASQPLSLRPEACRPAAGGAVHTRGLDFACDIYIWAPLAGTCGVLLLSLVITLYCNHRNRRRVCKCPRPVV

SEQ ID NO: 9620 - protein, 157 aa, -Artificial-Sequence
MALPVTALLLPLALLLHAARPCPYSNPSLCSGGGGSELPTQGTFSNVSTNVSPAKPTTTACPYSNPSLCSGGGGSPAPRPPTPAPTIASQPLSLRPEACRPAAGGAVHTRGLDFACDIYIWAPLAGTCGVLLLSLVITLYCNHRNRRRVCKCPRPVV

SEQ ID NO: 9621 - protein, 291 aa, -Artificial-Sequence
MYRMQLLSCIALSLALVTNSAPTSSSTKKTQLQLEHLLLDLQMILNGINNYKNPKLTRMLTFKFYMPKKATELKHLQCLEEELKPLEEVLNLAQSKNFHLRPRDLISNINVIVLELKGSETTFMCEYADETATIVEFLNRWITFCQSIISTLTHMCPYSNPSLCSGGGGSELPTQGTFSNVSTNVSPAKPTTTACPYSNPSLCSGGGGSPAPRPPTPAPTIASQPLSLRPEACRPAAGGAVHTRGLDFACDIYIWAPLAGTCGVLLLSLVITLYCNHRNRRRVCKCPRPVV

SEQ ID NO: 9622 - protein, 233 aa, -Artificial-Sequence; identical to SEQ ID NO: 7844

SEQ ID NO: 9623 - protein, 300 aa, -Artificial-Sequence
MRISKPHLRSISIQCYLCLLLNSHFLTEAGIHVFILGCFSAGLPKTEANWVNVISDLKKIEDLIQSMHIDATLYTESDVHPSCKVTAMKCFLLELQVISLESGDASIHDTVENLIILANNSLSSNGNVTESGCKECEELEEKNIKEFLQSFVHIVQMFINTSHMCPYSNPSLCSGGGGSELPTQGTFSNVSTNVSPAKPTTTACPYSNPSLCSGGGGSPAPRPPTPAPTIASQPLSLRPEACRPAAGGAVHTRGLDFACDIYIWAPLAGTCGVLLLSLVITLYCNHRNRRRVCKCPRPVV

SEQ ID NO: 9624 - protein, 300 aa, -Artificial-Sequence
MRISKPHLRSISIQCYLCLLLNSHFLTEAGIHVFILGCFSAGLPKTEANWVNVISDLKKIEDLIQSMHIDATLYTESDVHPSCKVTAMKCFLLELQVISLESGDASIHDTVKNLIILANNSLSSNGNVTESGCKECEELEEKNIKEFLQSFVHIVQMFINTSHMCPYSNPSLCSGGGGSELPTQGTFSNVSTNVSPAKPTTTACPYSNPSLCSGGGGSPAPRPPTPAPTIASQPLSLRPEACRPAAGGAVHTRGLDFACDIYIWAPLAGTCGVLLLSLVITLYCNHRNRRRVCKCPRPVV

SEQ ID NO: 9625 - protein, 334 aa, -Artificial-Sequence
MYRMQLLSCIALSLALVTNSAPTSSSTKKTQLQLEHLLLDLQMILNGINNYKNPKLTRMLTFKFYMPKKATELKHLQCLEEELKPLEEVLNLAQSKNFHLRPRDLISNINVIVLELKGSETTFMCEYADETATIVEFLNRWITFCQSIISTLTHMACHQLCARGHCWGPGPTQCVNCSQFLRGQECVEECRVLQGLPREYVNARHCLPCHPECQPQNGSVTCFGPEADQCVACAHYKDPPFCVARCPSGVKPDLSYMPIWKFPDEEGACQPCPINCTHSCVDLDDKGCPAEQRASPLTSIISAVVGILLVVVLGVVFGILIKRRQQKIRKYTMR

SEQ ID NO: 9626 - protein, 200 aa, -Artificial-Sequence
MALPVTALLLPLALLLHAARPACHQLCARGHCWGPGPTQCVNCSQFLRGQECVEECRVLQGLPREYVNARHCLPCHPECQPQNGSVTCFGPEADQCVACAHYKDPPFCVARCPSGVKPDLSYMPIWKFPDEEGACQPCPINCTHSCVDLDDKGCPAEQRASPLTSIISAVVGILLVVVLGVVFGILIKRRQQKIRKYTMR

SEQ ID NO: 9627 - protein, 94 aa, -Artificial-Sequence; identical to SEQ ID NO: 3561

SEQ ID NO: 9628 - protein, 94 aa, -Artificial-Sequence
IQNPDPAVYQLRDSKSSDKSVCLFTDFDSQTNVSQSKDSDVYITDKCVLDMRSMDFKSNSAVAWSNKSDFACANAFNNSIIPEDTFFPSSDVPC

SEQ ID NO: 9629 - protein, 94 aa, -Artificial-Sequence
IQNPDPAVYQLRDSKSSDKSVCLFTDFDSQTNVSQSKDSDVYITDKCVLDMRSMDFKSNSAVAWSNKSDFACANAFNNSIIPEDTFFPSPESSC

SEQ ID NO: 9630 - protein, 132 aa, -Artificial-Sequence
EDLKNVFPPEVAVFEPSEAEISHTQKATLVCLATGFYPDHVELSWWVNGKEVHSGVSTDPQPLKEQPALNDSRYCLSSRLRVSATFWQNPRNHFRCQVQFYGLSENDEWTQDRAKPVTQIVSAEAWGRADCG

SEQ ID NO: 9631 - protein, 131 aa, -Artificial-Sequence
EDLKNVFPPEVAVFEPSKAEIAHTQKATLVCLATGFYPDHVELSWWVNGKEVHSGVCTDPQPLKEQPALNDSRYCLSSRLRVSATFWQNPRNHFRCQVQFYGLSENDEWTQDRAKPVTQIVSAEAWGRADC

SEQ ID NO: 9632 - protein, 131 aa, -Artificial-Sequence
EDLKNVFPPEVAVFEPSEAEISHTQKATLVCLATGFYPDHVELSWWVNGKEVHSGVCTDPQPLKEQPALNDSRYCLSSRLRVSATFWQNPRNHFRCQVQFYGLSENDEWTQDRAKPVTQIVSAEAWGRADC

SEQ ID NO: 9633 - protein, 238 aa, -Artificial-Sequence; identical to SEQ ID NO: 3809

SEQ ID NO: 9634 - protein, 238 aa, -Artificial-Sequence; identical to SEQ ID NO: 3811

SEQ ID NO: 9635 - protein, 217 aa, -Artificial-Sequence
GMRTEDLPKAVVFLEPQWYSVLEKDSVTLKCQGAYSPEDNSTQWFHNENLISSQASSYFIDAATVNDSGEYRCQTNLSTLSDPVQLEVHIGWLLLQAPRWVFKEEDPIHLRCHSWKNTALHKVTYLQNGKDRKYFHHNSDFHIPKATLKDSGSYFCRGLVGSKNVSSETVNITITQGLAVSTISSFSPPGYQVSFCLVMVLLFAVDTGLYFSVKTNI

SEQ ID NO: 9636 - protein, 183 aa, -Artificial-Sequence; identical to SEQ ID NO: 3763

SEQ ID NO: 9637 - protein, 255 aa, -Artificial-Sequence; identical to SEQ ID NO: 3776

SEQ ID NO: 9638 - protein, 283 aa, -Artificial-Sequence; identical to SEQ ID NO: 3789

SEQ ID NO: 9639 - protein, 327 aa, -Artificial-Sequence
HEGVHRKPSLLAHPGRLVKSEETVILQCWSDVMFEHFLLHREGMFNDTLRLIGEHHDGVSKANFSISRMTQDLAGTYRCYGSVTHSPYQVSAPSDPLDIVIIGLYEKPSLSAQLGPTVLAGENVTLSCSSRSSYDMYHLSREGEAHERRLPAGPKVNGTFQADFPLGPATHGGTYRCFGSFHDSPYEWSKSSDPLLVSVTGNPSNSWPSPTEPSSKTGNPRHLHILIGTSVVIILFILLFFLLHRWCSNKKNAAVMDQESAGNRTANSEDSDEQDPQEVTYTQLNHCVFTQRKITRPSQRPKTPPTDIIVYTELPNAESRSKVVSCP

SEQ ID NO: 9640 - protein, 327 aa, -Artificial-Sequence
HEGVHRKPSLLAHPGRLVKSEETVILQCWSDVRFEHFLLHREGKFKDTLHLIGEHHDGVSKANFSIGPMMQDLAGTYRCYGSVTHSPYQLSAPSDPLDIVITGLYEKPSLSAQPGPTVLAGESVTLSCSSRSSYDMYHLSREGEAHECRFSAGPKVNGTFQADFPLGPATHGGTYRCFGSFRDSPYEWSNSSDPLLVSVTGNPSNSWPSPTEPSSKTGNPRHLHILIGTSVVIILFILLFFLLHRWCSNKKNAAVMDQESAGNRTANSEDSDEQDPQEVTYTQLNHCVFTQRKITRPSQRPKTPPTDIIVYTELPNAESRSKVVSCP

SEQ ID NO: 9641 - protein, 320 aa, -Artificial-Sequence
HEGVHRKPSLLAHPGPLVKSEETVILQCWSDVRFQHFLLHREGKFKDTLHLIGEHHDGVSKANFSIGPMMQDLAGTYRCYGSVTHSPYQLSAPSDPLDIVITGLYEKPSLSAQPGPTVLAGESVTLSCSSRSSYDMYHLSREGEAHERRFSAGPKVNGTFQADFPLGPATHGGTYRCFGSFRDSPYEWSNSSDPLLVSVTGNPSNSWPSPTEPSSETGNPRHLHVLIGTSVVIILFILLLFFLLHRWCCNKKNAVVMDQEPAGNRTVNREDSDEQDPQEVTYAQLNHCVFTQRKITRPSQRPKTPPTDIIVYTELPNAEP

SEQ ID NO: 9642 - protein, 354 aa, -Artificial-Sequence
HEGGQDKPLLSAWPSAVVPRGGHVTLLCRSRLGFTIFSLYKEDGVPVPELYNKIFWKSILMGPVTPAHAGTYRCRGSHPRSPIEWSAPSNPLVIVVTGLFGKPSLSAQPGPTVRTGENVTLSCSSRSSFDMYHLSREGRAHEPRLPAVPSVNGTFQADFPLGPATHGGTYTCFGSLHDSPYEWSDPSDPLLVSVTGNSSSSSSSPTEPSSKTGIRRHLHILIGTSVAIILFIILFFFLLHCCCSNKKNAAVMDQEPAGDRTVNREDSDDQDPQEVTYAQLDHCVFTQTKITSPSQRPKTPPTDTTMYMELPNAKPRSLSPAHKHHSQALRGSSRETTALSQNRVASSHVPAAGI

SEQ ID NO: 9643 - protein, 354 aa, -Artificial-Sequence
HEGGQDKPLLSAWPSAVVPRGGHVTLLCRSRLGFTIFSLYKEDGVPVPELYNKIFWKSILMGPVTPAHAGTYRCRGSHPRSPIEWSAPSNPLVIVVTGLFGKPSLSAQPGPTVRTGENVALSCSSRSSFDMYHLSREGRAHEPRLPAVPSVDGTFQADFPLGPATHGGTYTCFSSLHDSPYEWSDPSDPLLVSVTGNSSSSSSSPTEPSSKTGIRRHLHILIGTSVAIILFIILFFFLLHCCCSNKKNAAVMDQGPAGDRTVNREDSDDQDPQEVTYAQLDHCVFTQTKITSPSQRPKAPPTDTTMYMELPNAKPRSLSPAHKHHSQALRGSSRETTALSQNRVASSHVPAAGI

SEQ ID NO: 9644 - protein, 426 aa, -Artificial-Sequence
AGPHVGGQDKPFLSAWPSAVVPRGGHVTLRCHYRHRFNNFMLYKEDRIHVPIFHGRLFQESFNMSPVTTAHAGNYTCRGSHPHSPTGWSAPSNPVVIMVTGNHRKPSLLAHPGPLVKSGERVILQCWSDIMFEHFFLHKEGISKDPSRLVGQIHDGVSKANFSIGPMMLALAGTYRCYGSVTHTPYQLSAPSDPLDIVVTGPYEKPSLSAQPGPKVQAGESVTLSCSSRSSYDMYHLSREGGAHERRLPAVRKVNRTFQADFPLGPATHGGTYRCFGSFRHSPYEWSDPSDPLLVSVTGNPSSSWPSPTEPSSKSGNPRHLHILIGTSVVIILFILLLFFLLHLWCSNKKNAAVMDQEPAGNRTANSEDSDEQDPEEVTYAQLDHCVFTQRKITRPSQRPKTPPTDTILYTELPNAKPRSKVVSCP

SEQ ID NO: 9645 - protein, 417 aa, -Artificial-Sequence
LMGGQDKPFLSARPSTVVPRGGHVALQCHYRRGFNNFMLYKEDRSHVPIFHGRIFQESFIMGPVTPAHAGTYRCRGSRPHSLTGWSAPSNPLVIMVTGNHRKPSLLAHPGPLLKSGETVILQCWSDVMFEHFFLHREGISEDPSRLVGQIHDGVSKANFSIGPLMPVLAGTYRCYGSVPHSPYQLSAPSDPLDIVITGLYEKPSLSAQPGPTVQAGENVTLSCSSWSSYDIYHLSREGEAHERRLRAVPKVNRTFQADFPLGPATHGGTYRCFGSFRALPCVWSNSSDPLLVSVTGICRHLHVLIGTSVVIFLFILLLFFLLYRWCSNKKNAAVMDQEPAGDRTVNRQDSDEQDPQEVTYAQLDHCVFIQRKISRPSQRPKTPLTDTSVYTELPNAEPRSKVVSCPRAPQSGLEGVF

SEQ ID NO: 9646 - protein, 434 aa, -Artificial-Sequence
LMGGQDKPFLSARPSTVVPRGGHVALQCHYRRGFNNFMLYKEDRSHVPIFHGRIFQESFIMGPVTPAHAGTYRCRGSRPHSLTGWSAPSNPLVIMVTGNHRKPSLLAHPGPLLKSGETVILQCWSDVMFEHFFLHREGISEDPSRLVGQIHDGVSKANFSIGPLMPVLAGTYRCYGSVPHSPYQLSAPSDPLDIVITGLYEKPSLSAQPGPTVQAGENVTLSCSSWSSYDIYHLSREGEAHERRLRAVPKVNRTFQADFPLGPATHGGTYRCFGSFRALPCVWSNSSDPLLVSVTGNPSSSWPSPTEPSSKSGICRHLHVLIGTSVVIFLFILLLFFLLYRWCSNKKNAAVMDQEPAGDRTVNRQDSDEQDPQEVTYAQLDHCVFIQRKISRPSQRPKTPLTDTSVYTELPNAEPRSKVVSCPRAPQSGLEGVF

SEQ ID NO: 9647 - protein, 385 aa, -Artificial-Sequence
QDKPFLSAWPGTVVSEGQHVTLQCRSRLGFNEFSLSKEDGMPVPELYNRIFRNSFLMGPVTPAHAGTYRCCSSHPHSPTGWSAPSNPVVIMVTGVHRKPSLLAHPGPLVKSGETVILQCWSDVRFERFLLHREGITEDPLRLVGQLHDAGSQVNYSMGPMTPALAGTYRCFGSVTHLPYELSAPSDPLDIVVVGLYGKPSLSAQPGPTVQAGENVTLSCSSRSLFDIYHLSREAEAGELRLTAVLRVNGTFQANFPLGPVTHGGNYRCFGSFRALPHAWSDPSDPLPVSVTGNSRNLHVLIGTSVVIIPFAILLFFLLHRWCANKKNAVVMDQEPAGNRTVNREDSDEQDPQEVTYAQLNHCVFTQRKITRPSQRPKTPPTDTSV

SEQ ID NO: 9648 - protein, 356 aa, -Artificial-Sequence
WAHVGGQDKPFCSAWPSAVVPQGGHVTLRCHYRRGFNIFTLYKKDGVPVPELYNRIFWNSFLISPVTPAHAGTYRCRGFHPHSPTEWSAPSNPLVIMVTGLYEKPSLTARPGPTVRAGENVTLSCSSQSSFDIYHLSREGEAHELRLPAVPSINGTFQADFPLGPATHGETYRCFGSFHGSPYEWSDPSDPLPVSVTGNPSSSWPSPTEPSFKTGIARHLHAVIRYSVAIILFTILPFFLLHRWCSKKKNAAVMNQEPAGHRTVNREDSDEQDPQEVTYAQLDHCIFTQRKITGPSQRSKRPSTDTSVCIELPNAEPRALSPAHEHHSQALMGSSRETTALSQTQLASSNVPAAGI

SEQ ID NO: 9649 - protein, 252 aa, -Artificial-Sequence
WAHVGGQDKPFCSAWPSAVVPQGGHVTLRCHYRRGFNIFTLYKKDGVPVPELYNRIFWNSFLISPVTPAHAGTYRCRGFHPHSPTEWSAPSNPLVIMVTGLYEKPSLTARPGPTVRAGENVTLSCSSQSSFDIYHLSREGEAHELRLPAVPSINGTFQADFPLGPATHGETYRCFGSFHGSPYEWSDPSDPLPVSVTGNPSSSWPSPTEPSFKTGIARHLHAVIRYSVAIILFTILPFFLLHRWCSKKKMLL

SEQ ID NO: 9650 - protein, 283 aa, -Artificial-Sequence
HEGVHRKPSLLAHPGRLVKSEETVILQCWSDVMFEHFLLHREGMFNDTLRLIGEHHDGVSKANFSISRMKQDLAGTYRCYGSVTHSPYQLSAPSDPLDIVIIGLYEKPSLSAQPGPTVLAGENVTLSCSSRSSYDMYHLSREGEAHERRLPAGTKVNGTFQANFPLGPATHGGTYRCFGSFRDSPYEWSKSSDPLLVSVTGNPSNSWPSPTEPSSETGNPRHLHVLIGTSVVKIPFTILLFFLLHRWCSDKKNAAVMDQEPAGNRTVNSEDSDEQDHQEVSYA

SEQ ID NO: 9651 - protein, 283 aa, -Artificial-Sequence
HEGVHRKPSLLAHPGPLVKSEETVILQCWSDVRFEHFLLHREGKYKDTLHLIGEHHDGVSKANFSIGPMMQDLAGTYRCYGSVTHSPYQLSAPSDPLDIVITGLYEKPSLSAQPGPTVLAGESVTLSCSSRSSYDMYHLSREGEAHERRFSAGPKVNGTFQADFPLGPATHGGTYRCFGSFRDSPYEWSNSSDPLLVSVTGNPSNSWPSPTEPSSKTGNPRHLHVLIGTSVVKIPFTILLFFLLHRWCSNKKNAAVMDQEPAGNRTVNSEDSDEQDHQEVSYA

SEQ ID NO: 9652 - protein, 283 aa, -Artificial-Sequence
HEGFRRKPSLLAHPGRLVKSEETVILQCWSDVMFEHFLLHREGTFNDTLRLIGEHIDGVSKANFSIGRMRQDLAGTYRCYGSVPHSPYQFSAPSDPLDIVITGLYEKPSLSAQPGPTVLAGESVTLSCSSWSSYDMYHLSTEGEAHERRFSAGPKVNGTFQADFPLGPATQGGTYRCFGSFHDSPYEWSKSSDPLLVSVTGNPSNSWPSPTEPSSKTGNPRHLHVLIGTSVVKLPFTILLFFLLHRWCSDKKNASVMDQGPAGNRTVNREDSDEQDHQEVSYA

SEQ ID NO: 9653 - protein, 283 aa, -Artificial-Sequence
QEGVHRKPSFLALPGHLVKSEETVILQCWSDVMFEHFLLHREGKFNNTLHLIGEHHDGVSKANFSIGPMMPVLAGTYRCYGSVPHSPYQLSAPSDPLDMVIIGLYEKPSLSAQPGPTVQAGENVTLSCSSRSSYDMYHLSREGEAHERRLPAVRSINGTFQADFPLGPATHGGTYRCFGSFRDAPYEWSNSSDPLLVSVTGNPSNSWPSPTEPSSKTGNPRHLHVLIGTSVVKIPFTILLFFLLHRWCSDKKNAAVMDQEPAGNRTVNSEDSDEQDHQEVSYA

SEQ ID NO: 9654 - protein, 283 aa, -Artificial-Sequence
HEGFRRKPSLLAHPGPLVKSEETVILQCWSDVMFEHFLLHREGTFNHTLRLIGEHIDGVSKGNFSIGRMTQDLAGTYRCYGSVTHSPYQLSAPSDPLDIVITGLYEKPSLSAQPGPTVLAGESVTLSCSSRSSYDMYHLSREGEAHERRLPAGPKVNRTFQADFPLDPATHGGTYRCFGSFRDSPYEWSKSSDPLLVSVTGNSSNSWPSPTEPSSETGNPRHLHVLIGTSVVKLPFTILLFFLLHRWCSNKKNASVMDQGPAGNRTVNREDSDEQDHQEVSYA

SEQ ID NO: 9655 - protein, 364 aa, -Artificial-Sequence
AGPHMGGQDKPFLSAWPSAVVPRGGHVTLRCHYRHRFNNFMLYKEDRIHVPIFHGRIFQEGFNMSPVTTAHAGNYTCRGSHPHSPTGWSAPSNPMVIMVTGNHRKPSLLAHPGPLVKSGERVILQCWSDIMFEHFFLHKEWISKDPSRLVGQIHDGVSKANFSIGSMMRALAGTYRCYGSVTHTPYQLSAPSDPLDIVVTGLYEKPSLSAQPGPKVQAGESVTLSCSSRSSYDMYHLSREGGAHERRLPAVRKVNRTFQADFPLGPATHGGTYRCFGSFRHSPYEWSDPSDPLLVSVTGNPSSSWPSPTEPSSKSGNLRHLHILIGTSVVKIPFTILLFFLLHRWCSNKKKCCCNGPRACREQK

SEQ ID NO: 9656 - protein, 376 aa, -Artificial-Sequence
SLTNHTETITVEEGQTLTLKCVTSLRKNSSLQWLTPSGFTIFLNEYPALKNSKYQLLHHSANQLSITVPNVTLQDEGVYKCLHYSDSVSTKEVKVIVLATPFKPILEASVIRKQNGEEHVVLMCSTMRSKPPPQITWLLGNSMEVSGGTLHEFETDGKKCNTTSTLIIHTYGKNSTVDCIIRHRGLQGRKLVAPFRFEDLVTDEETASDALERNSLSSQDPQQPTSTVSVTEDSSTSEIDKEEKEQTTQDPDLTTEANPQYLGLARKKSGILLLTLVSFLIFILFIIVQLFIMKLRKAHVIWKKENEVSEHTLESYRSRSNNEETSSEEKNGQSSHPMRCMNYITKLYSEAKTKRKENVQHSKLEEKHIQVPESIV

SEQ ID NO: 9657 - protein, 223 aa, -Artificial-Sequence [sequence omitted]

SEQ ID NO: 9658 - protein, 311 aa, -Artificial-Sequence
QSSLTPLMVNGILGESVTLPLEFPAGEKVNFITWLFNETSLAFIVPHETKSPEIHVTNPKQGKRLNFTQSYSLQLSNLKMEDTGSYRAQISTKTSAKLSSYTLRILRQLRNIQVTNHSQLFQNMTCELHLTCSVEDADDNVSFRWEALGNTLSSQPNLTVSWDPRISSEQDYTCIAENAVSNLSFSVSAQKLCEDVKIQYTDTKMILFMVSGICIVFGFIILLLLVLRKRRDSLSLSTQRTQGPAESARNLEYVSVSPTNNTVYASVTHSNRETEIWTPRENDTITIYSTINHSKESKPTFSRATALDNVV

SEQ ID NO: 9659 - protein, 313 aa, -Artificial-Sequence
SGPVKELVGSVGGAVTFPLKSKVKQVDSIVWTFNTTPLVTIQPEGGTIIVTQNRNRERVDFPDGGYSLKLSKLKKNDSGIYYVGIYSSSLQQPSTQEYVLHVYEHLSKPKVTMGLQSNKNGTCVTNLTCCMEHGEEDVIYTWKALGQAANESHNGSILPISWRWGESDMTFICVARNPVSRNFSSPILARKLCEGAADDPDSSMVLLCLLLVPLLLSLFVLGLFLWFLKRERQEEYIEEKKRVDICRETPNICPHSGENTEYDTIPHTNRTILKEDPANTVYSTVEIPKKMENPHSLLTMPDTPRLFAYENVI

SEQ ID NO: 9660 - protein, 241 aa, -Artificial-Sequence
ATPAPKSCPERHYWAQGKLCCQMCEPGTFLVKDCDQHRKAAQCDPCIPGVSFSPDHHTRPHCESCRHCNSGLLVRNCTITANAECACRNGWQCRDKECTECDPLPNPSLTARSSQALSPHPQPTHLPYVSEMLEARTAGHMQTLADFRQLPARTLSTHWPPQRSLCSSDFIRILVIFSGMFLVFTLAGALFLHQRRKYRSNKGESPVEPAEPCHYSCPREEEGSTIPIQEDYRKPEPACSP

SEQ ID NO: 9661 - protein, 629 aa, -Artificial-Sequence
GHLPKPTLWAEPGSVITQGSPVTLRCQGGQETQEYRLYREKKTAPWITRIPQELVKKGQFPIPSITWEHTGRYRCYYGSDTAGRSESSDPLELVVTGAYIKPTLSAQPSPVVNSGGNVTLQCDSQVAFDGFILCKEGEDEHPQCLNSQPHARGSSRAIFSVGPVSPSRRWWYRCYAYDSNSPYEWSLPSDLLELLVLGVSKKPSLSVQPGPIVAPEETLTLQCGSDAGYNRFVLYKDGERDFLQLAGAQPQAGLSQANFTLGPVSRSYGGQYRCYGAHNLSSEWSAPSDPLDILIAGQFYDRVSLSVQPGPTVASGENVTLLCQSQGWMQTFLLTKEGAADDPWRLRSTYQSQKYQAEFPMGPVTSAHAGTYRCYGSQSSKPYLLTHPSDPLELVVSGPSGGPSSPTTGPTSTSAGPEDQPLTPTGSDPQSGLGRHLGVVIGILVAVILLLLLLLLLFLILRHRRQGKHWTSTQRKADFQHPAGAVGPEPTDRGLQWRSSPAADAQEENLYAAVKHTQPEDGVEMDTRQSPHDEDPQAVTYAEVKHSRPRREMASPPSPLSGEFLDTKDRQAEEDRQMDTEAAASEAPQDVTYAQLHSLTLRREATEPPPSQEGPSPAVPSIYATLAIH

SEQ ID NO: 9662 - protein, 266 aa, -Artificial-Sequence
QEEDLPRPSISAEPGTVIPLGSHVTFVCRGPVGVQTFRLERDSRSTYNDTEDVSQASPSESEARFRIDSVREGNAGLYRCIYYKPPKWSEQSDYLELLVKESSGGPDSPDTEPGSSAGPTQRPSDNSHNEHAPASQGLKAEHLYILIGVSVVFLFCLLLLVLFCLHRQNQIKQGPPRSKDEEQKPQQRPDLAVDVLERTADKATVNGLPEKDRETDTSALAAGSSQEVTYAQLDHWALTQRTARAVSPQSTKPMAESITYAAVARH

SEQ ID NO: 9663 - protein, 232 aa, -Artificial-Sequence; identical to SEQ ID NO: 3967

SEQ ID NO: 9664 - protein, 202 aa, -Artificial-Sequence; identical to SEQ ID NO: 3969

SEQ ID NO: 9665 - protein, 249 aa, -Artificial-Sequence; identical to SEQ ID NO: 3971

SEQ ID NO: 9666 - protein, 346 aa, -Artificial-Sequence; identical to SEQ ID NO: 3973

SEQ ID NO: 9667 - protein, 268 aa, -Artificial-Sequence; identical to SEQ ID NO: 3975

SEQ ID NO: 9668 - protein, 360 aa, -Artificial-Sequence; identical to SEQ ID NO: 3977

SEQ ID NO: 9669 - protein, 65 aa, -Artificial-Sequence; identical to SEQ ID NO: 3845

SEQ ID NO: 9670 - protein, 238 aa, -Artificial-Sequence; identical to SEQ ID NO: 3811

SEQ ID NO: 9671 - protein, 44 aa, -Artificial-Sequence
ITQGLAVSTISSFSPPGYQVSFCLVMVLLFAVDTGLYFSVKTNI

SEQ ID NO: 9672 - protein, 75 aa, -Artificial-Sequence; identical to SEQ ID NO: 3770

SEQ ID NO: 9673 - protein, 156 aa, -Artificial-Sequence; identical to SEQ ID NO: 3777

SEQ ID NO: 9674 - protein, 93 aa, -Artificial-Sequence; identical to SEQ ID NO: 3792

SEQ ID NO: 9675 - protein, 127 aa, -Artificial-Sequence
GNPSNSWPSPTEPSSKTGNPRHLHILIGTSVVIILFILLFFLLHRWCSNKKNAAVMDQESAGNRTANSEDSDEQDPQEVTYTQLNHCVFTQRKITRPSQRPKTPPTDIIVYTELPNAESRSKVVSCP

SEQ ID NO: 9676 - protein, 143 aa, -Artificial-Sequence
PYEWSNSSDPLLVSVTGNPSNSWPSPTEPSSKTGNPRHLHILIGTSVVIILFILLFFLLHRWCSNKKNAAVMDQESAGNRTANSEDSDEQDPQEVTYTQLNHCVFTQRKITRPSQRPKTPPTDIIVYTELPNAESRSKVVSCP

SEQ ID NO: 9677 - protein, 120 aa, -Artificial-Sequence
GNPSNSWPSPTEPSSETGNPRHLHVLIGTSVVIILFILLLFFLLHRWCCNKKNAVVMDQEPAGNRTVNREDSDEQDPQEVTYAQLNHCVFTQRKITRPSQRPKTPPTDIIVYTELPNAEP

SEQ ID NO: 9678 - protein, 175 aa, -Artificial-Sequence
PYEWSDPSDPLLVSVTGNSSSSSSSPTEPSSKTGIRRHLHILIGTSVAIILFIILFFFLLHCCCSNKKNAAVMDQEPAGDRTVNREDSDDQDPQEVTYAQLDHCVFTQTKITSPSQRPKTPPTDTTMYMELPNAKPRSLSPAHKHHSQALRGSSRETTALSQNRVASSHVPAAGI

SEQ ID NO: 9679 - protein, 175 aa, -Artificial-Sequence
PYEWSDPSDPLLVSVTGNSSSSSSSPTEPSSKTGIRRHLHILIGTSVAIILFIILFFFLLHCCCSNKKNAAVMDQGPAGDRTVNREDSDDQDPQEVTYAQLDHCVFTQTKITSPSQRPKAPPTDTTMYMELPNAKPRSLSPAHKHHSQALRGSSRETTALSQNRVASSHVPAAGI

SEQ ID NO: 9680 - protein, 128 aa, -Artificial-Sequence
GNPSSSWPSPTEPSSKSGNPRHLHILIGTSVVIILFILLLFFLLHLWCSNKKNAAVMDQEPAGNRTANSEDSDEQDPEEVTYAQLDHCVFTQRKITRPSQRPKTPPTDTILYTELPNAKPRSKVVSCP

SEQ ID NO: 9681 - protein, 138 aa, -Artificial-Sequence
PCVWSNSSDPLLVSVTGICRHLHVLIGTSVVIFLFILLLFFLLYRWCSNKKNAAVMDQEPAGDRTVNRQDSDEQDPQEVTYAQLDHCVFIQRKISRPSQRPKTPLTDTSVYTELPNAEPRSKVVSCPRAPQSGLEGVF

SEQ ID NO: 9682 - protein, 155 aa, -Artificial-Sequence
PCVWSNSSDPLLVSVTGNPSSSWPSPTEPSSKSGICRHLHVLIGTSVVIFLFILLLFFLLYRWCSNKKNAAVMDQEPAGDRTVNRQDSDEQDPQEVTYAQLDHCVFIQRKISRPSQRPKTPLTDTSVYTELPNAEPRSKVVSCPRAPQSGLEGVF

SEQ ID NO: 9683 - protein, 115 aa, -Artificial-Sequence
SFRALPHAWSDPSDPLPVSVTGNSRNLHVLIGTSVVIIPFAILLFFLLHRWCANKKNAVVMDQEPAGNRTVNREDSDEQDPQEVTYAQLNHCVFTQRKITRPSQRPKTPPTDTSV

SEQ ID NO: 9684 - protein, 175 aa, -Artificial-Sequence
PYEWSDPSDPLPVSVTGNPSSSWPSPTEPSFKTGIARHLHAVIRYSVAIILFTILPFFLLHRWCSKKKNAAVMNQEPAGHRTVNREDSDEQDPQEVTYAQLDHCIFTQRKITGPSQRSKRPSTDTSVCIELPNAEPRALSPAHEHHSQALMGSSRETTALSQTQLASSNVPAAGI

SEQ ID NO: 9685 - protein, 71 aa, -Artificial-Sequence
PYEWSDPSDPLPVSVTGNPSSSWPSPTEPSFKTGIARHLHAVIRYSVAIILFTILPFFLLHRWCSKKKMLL

SEQ ID NO: 9686 - protein, 83 aa, -Artificial-Sequence
GNPSNSWPSPTEPSSETGNPRHLHVLIGTSVVKIPFTILLFFLLHRWCSDKKNAAVMDQEPAGNRTVNSEDSDEQDHQEVSYA

SEQ ID NO: 9687 - protein, 99 aa, -Artificial-Sequence
PYEWSNSSDPLLVSVTGNPSNSWPSPTEPSSKTGNPRHLHVLIGTSVVKIPFTILLFFLLHRWCSNKKNAAVMDQEPAGNRTVNSEDSDEQDHQEVSYA

SEQ ID NO: 9688 - protein, 99 aa, -Artificial-Sequence
PYEWSKSSDPLLVSVTGNPSNSWPSPTEPSSKTGNPRHLHVLIGTSVVKLPFTILLFFLLHRWCSDKKNASVMDQGPAGNRTVNREDSDEQDHQEVSYA

SEQ ID NO: 9689 - protein, 83 aa, -Artificial-Sequence
GNPSNSWPSPTEPSSKTGNPRHLHVLIGTSVVKIPFTILLFFLLHRWCSDKKNAAVMDQEPAGNRTVNSEDSDEQDHQEVSYA

SEQ ID NO: 9690 - protein, 99 aa, -Artificial-Sequence
PYEWSKSSDPLLVSVTGNSSNSWPSPTEPSSETGNPRHLHVLIGTSVVKLPFTILLFFLLHRWCSNKKNASVMDQGPAGNRTVNREDSDEQDHQEVSYA

SEQ ID NO: 9691 - protein, 66 aa, -Artificial-Sequence
GNPSSSWPSPTEPSSKSGNLRHLHILIGTSVVKIPFTILLFFLLHRWCSNKKKCCCNGPRACREQK

SEQ ID NO: 9692 - protein, 183 aa, -Artificial-Sequence
PFRFEDLVTDEETASDALERNSLSSQDPQQPTSTVSVTEDSSTSEIDKEEKEQTTQDPDLTTEANPQYLGLARKKSGILLLTLVSFLIFILFIIVQLFIMKLRKAHVIWKKENEVSEHTLESYRSRSNNEETSSEEKNGQSSHPMRCMNYITKLYSEAKTKRKENVQHSKLEEKHIQVPESIV

SEQ ID NO: 9693 - protein, 121 aa, -Artificial-Sequence
LEVLESSVAEHGARFQIPLLGAMAATLVVICTAVIVVVALTRKKKALRIHSVEGDLRRKSAGQEEWSPSAPSPPGSCVQAEAAPAGLCGEQRGEDCAELHDYFNVLSYRSLGNCSFFTETG

SEQ ID NO: 9694 - protein, 123 aa, -Artificial-Sequence
AQKLCEDVKIQYTDTKMILFMVSGICIVFGFIILLLLVLRKRRDSLSLSTQRTQGPAESARNLEYVSVSPTNNTVYASVTHSNRETEIWTPRENDTITIYSTINHSKESKPTFSRATALDNVV

SEQ ID NO: 9695 - protein, 129 aa, -Artificial-Sequence
SPILARKLCEGAADDPDSSMVLLCLLLVPLLLSLFVLGLFLWFLKRERQEEYIEEKKRVDICRETPNICPHSGENTEYDTIPHTNRTILKEDPANTVYSTVEIPKKMENPHSLLTMPDTPRLFAYENVI

SEQ ID NO: 9696 - protein, 82 aa, -Artificial-Sequence
PPQRSLCSSDFIRILVIFSGMFLVFTLAGALFLHQRRKYRSNKGESPVEPAEPCHYSCPREEEGSTIPIQEDYRKPEPACSP

SEQ ID NO: 9697 - protein, 170 aa, -Artificial-Sequence
LLVKESSGGPDSPDTEPGSSAGPTQRPSDNSHNEHAPASQGLKAEHLYILIGVSVVFLFCLLLLVLFCLHRQNQIKQGPPRSKDEEQKPQQRPDLAVDVLERTADKATVNGLPEKDRETDTSALAAGSSQEVTYAQLDHWALTQRTARAVSPQSTKPMAESITYAAVARH

SEQ ID NO: 9698 - protein, 243 aa, -Artificial-Sequence
HPSDPLELVVSGPSGGPSSPTTGPTSTSAGPEDQPLTPTGSDPQSGLGRHLGVVIGILVAVILLLLLLLLLFLILRHRRQGKHWTSTQRKADFQHPAGAVGPEPTDRGLQWRSSPAADAQEENLYAAVKHTQPEDGVEMDTRQSPHDEDPQAVTYAEVKHSRPRREMASPPSPLSGEFLDTKDRQAEEDRQMDTEAAASEAPQDVTYAQLHSLTLRREATEPPPSQEGPSPAVPSIYATLAIH

SEQ ID NO: 9699 - protein, 97 aa, -Artificial-Sequence
GPSPADLSPGASSVTPPAPAREPGHSPQIISFFLALTSTALLFLLFFLTLRFSVVKRGRKKLLYIFKQPFMRPVQTTQEEDGCSCRFPEEEEGGCEL

SEQ ID NO: 9700 - protein, 108 aa, -Artificial-Sequence; identical to SEQ ID NO: 3606

SEQ ID NO: 9701 - protein, 111 aa, -Artificial-Sequence
EDRDPPATQPQETQGPPARPITVQPTEAWPRTSQGPSTRPVEVPGGRAVAAILGLGLVLGLLGPLAILLALYLLRRDQRLPPDAHKPPGGGSFRTPIQEEQADAHSTLAKI

SEQ ID NO: 9702 - protein, 155 aa, -Artificial-Sequence
QDCQNAHQEFRFWPFLVIIVILSALFLGTLACFCVWRRKRKEKQSETSPKEFLTIYEDVKDLKTRRNHEQEQTFPGGGSTIYSMIQSQSSAPTSQEPAYTLYSLIQPSRKSGSRKRNHSPSFNSTIYEVIGKSQPKAQNPARLSRKELENFDVYS

SEQ ID NO: 9703 - protein, 97 aa, -Artificial-Sequence
VQAPSSSPMGIIVAVVTGIAVAAIVAAVVALIYCRKKRISALPGYPECREMGETLPEKPANPTNPDEADKVGAENTITYSLLMHPDALEEPDDQNRI

SEQ ID NO: 9704 - protein, 97 aa, -Artificial-Sequence
LQVLGLQLPTPVWFHVLFYLAVGIMFLVNTVLWVTIRKELKRKKKWDLEISLDSGHEKKVISSLQEDRHLEEELKCQEQKEEQLQEGVHRKEPQGAT

SEQ ID NO: 9705 - protein, 48 aa, -Artificial-Sequence
YQVSFCLVMVLLFAVDTGLYFSVKTNIRSSTRDWKDHKFKWRKDPQDK

SEQ ID NO: 9706 - protein, 48 aa, -Artificial-Sequence; identical to SEQ ID NO: 9705

SEQ ID NO: 9707 - protein, 27 aa, -Artificial-Sequence
YQVSFCLVMVLLFAVDTGLYFSVKTNI

SEQ ID NO: 9708 - protein, 66 aa, -Artificial-Sequence
AGTVLLLRAGFYAVSFLSVAVGSTVYYQGKCLTWKGPRRQLPAVVPAPLPPPCGSSAHLLPPVPGG

SEQ ID NO: 9709 - protein, 84 aa, -Artificial-Sequence
LVPVFCGLLVAKSLVLSALLVWWGDIWWKTMMELRSLDTQKATCHLQQVTDLPWTSVSSPVEREILYHTVARTKISDDDDEHTL

SEQ ID NO: 9710 - protein, 46 aa, -Artificial-Sequence
MGLAFLVLVALVWFLVEDWLSRKRTRERASRASTWEGRRRLNTQTL

SEQ ID NO: 9711 - protein, 105 aa, -Artificial-Sequence
LHILIGTSVVIILFILLFFLLHRWCSNKKNAAVMDQESAGNRTANSEDSDEQDPQEVTYTQLNHCVFTQRKITRPSQRPKTPPTDIIVYTELPNAESRSKVVSCP

SEQ ID NO: 9712 - protein, 105 aa, -Artificial-Sequence; identical to SEQ ID NO: 9711

SEQ ID NO: 9713 - protein, 96 aa, -Artificial-Sequence
VLIGTSVVIILFILLLFFLLHRWCCNKKNAVVMDQEPAGNRTVNREDSDEQDPQEVTYAQLNHCVFTQRKITRPSQRPKTPPTDIIVYTELPNAEP

SEQ ID NO: 9714 - protein, 137 aa, -Artificial-Sequence
LHILIGTSVAIILFIILFFFLLHCCCSNKKNAAVMDQEPAGDRTVNREDSDDQDPQEVTYAQLDHCVFTQTKITSPSQRPKTPPTDTTMYMELPNAKPRSLSPAHKHHSQALRGSSRETTALSQNRVASSHVPAAGI

SEQ ID NO: 9715 - protein, 137 aa, -Artificial-Sequence
LHILIGTSVAIILFIILFFFLLHCCCSNKKNAAVMDQGPAGDRTVNREDSDDQDPQEVTYAQLDHCVFTQTKITSPSQRPKAPPTDTTMYMELPNAKPRSLSPAHKHHSQALRGSSRETTALSQNRVASSHVPAAGI

SEQ ID NO: 9716 - protein, 106 aa, -Artificial-Sequence
LHILIGTSVVIILFILLLFFLLHLWCSNKKNAAVMDQEPAGNRTANSEDSDEQDPEEVTYAQLDHCVFTQRKITRPSQRPKTPPTDTILYTELPNAKPRSKVVSCP

SEQ ID NO: 9717 - protein, 115 aa, -Artificial-Sequence
VLIGTSVVIFLFILLLFFLLYRWCSNKKNAAVMDQEPAGDRTVNRQDSDEQDPQEVTYAQLDHCVFIQRKISRPSQRPKTPLTDTSVYTELPNAEPRSKVVSCPRAPQSGLEGVF

SEQ ID NO: 9718 - protein, 115 aa, -Artificial-Sequence; identical to SEQ ID NO: 9717

SEQ ID NO: 9719 - protein, 88 aa, -Artificial-Sequence
HVLIGTSVVIIPFAILLFFLLHRWCANKKNAVVMDQEPAGNRTVNREDSDEQDPQEVTYAQLNHCVFTQRKITRPSQRPKTPPTDTSV

SEQ ID NO: 9720 - protein, 135 aa, -Artificial-Sequence
AVIRYSVAIILFTILPFFLLHRWCSKKKNAAVMNQEPAGHRTVNREDSDEQDPQEVTYAQLDHCIFTQRKITGPSQRSKRPSTDTSVCIELPNAEPRALSPAHEHHSQALMGSSRETTALSQTQLASSNVPAAGI

SEQ ID NO: 9721 - protein, 31 aa, -Artificial-Sequence
AVIRYSVAIILFTILPFFLLHRWCSKKKMLL

SEQ ID NO: 9722 - protein, 59 aa, -Artificial-Sequence
VLIGTSVVKIPFTILLFFLLHRWCSDKKNAAVMDQEPAGNRTVNSEDSDEQDHQEVSYA

SEQ ID NO: 9723 - protein, 59 aa, -Artificial-Sequence
VLIGTSVVKIPFTILLFFLLHRWCSNKKNAAVMDQEPAGNRTVNSEDSDEQDHQEVSYA

SEQ ID NO: 9724 - protein, 59 aa, -Artificial-Sequence
VLIGTSVVKLPFTILLFFLLHRWCSDKKNASVMDQGPAGNRTVNREDSDEQDHQEVSYA

SEQ ID NO: 9725 - protein, 63 aa, -Artificial-Sequence
LHVLIGTSVVKIPFTILLFFLLHRHRWCSDKKNAAVMDQEPAGNRTVNSEDSDEQDHQEVSYA

SEQ ID NO: 9726 - protein, 59 aa, -Artificial-Sequence
VLIGTSVVKLPFTILLFFLLHRWCSNKKNASVMDQGPAGNRTVNREDSDEQDHQEVSYA

SEQ ID NO: 9727 - protein, 44 aa, -Artificial-Sequence
LHILIGTSVVKIPFTILLFFLLHRWCSNKKKCCCNGPRACREQK

SEQ ID NO: 9728 - protein, 106 aa, -Artificial-Sequence
ILLLTLVSFLIFILFIIVQLFIMKLRKAHVIWKKENEVSEHTLESYRSRSNNEETSSEEKNGQSSHPMRCMNYITKLYSEAKTKRKENVQHSKLEEKHIQVPESIV

SEQ ID NO: 9729 - protein, 103 aa, -Artificial-Sequence
LLGAMAATLVVICTAVIVVVALTRKKKALRIHSVEGDLRRKSAGQEEWSPSAPSPPGSCVQAEAAPAGLCGEQRGEDCAELHDYFNVLSYRSLGNCSFFTETG

SEQ ID NO: 9730 - protein, 123 aa, -Artificial-Sequence; identical to SEQ ID NO: 9694

SEQ ID NO: 9731 - protein, 109 aa, -Artificial-Sequence
VLLCLLLVPLLLSLFVLGLFLWFLKRERQEEYIEEKKRVDICRETPNICPHSGENTEYDTIPHTNRTILKEDPANTVYSTVEIPKKMENPHSLLTMPDTPRLFAYENVI

SEQ ID NO: 9732 - protein, 69 aa, -Artificial-Sequence
ILVIFSGMFLVFTLAGALFLHQRRKYRSNKGESPVEPAEPCHYSCPREEEGSTIPIQEDYRKPEPACSP

SEQ ID NO: 9733 - protein, 122 aa, -Artificial-Sequence
ILIGVSVVFLFCLLLLVLFCLHRQNQIKQGPPRSKDEEQKPQQRPDLAVDVLERTADKATVNGLPEKDRETDTSALAAGSSQEVTYAQLDHWALTQRTARAVSPQSTKPMAESITYAAVARH

SEQ ID NO: 9734 - protein, 193 aa, -Artificial-Sequence
LGVVIGILVAVILLLLLLLLLFLILRHRRQGKHWTSTQRKADFQHPAGAVGPEPTDRGLQWRSSPAADAQEENLYAAVKHTQPEDGVEMDTRQSPHDEDPQAVTYAEVKHSRPRREMASPPSPLSGEFLDTKDRQAEEDRQMDTEAAASEAPQDVTYAQLHSLTLRREATEPPPSQEGPSPAVPSIYATLAIH

SEQ ID NO: 9735 - protein, 69 aa, -Artificial-Sequence
IISFFLALTSTALLFLLFFLTLRFSVVKRGRKKLLYIFKQPFMRPVQTTQEEDGCSCRFPEEEEGGCEL

SEQ ID NO: 9736 - protein, 68 aa, -Artificial-Sequence
FWVLVVVGGVLACYSLLVTVAFIIFWVRSKRSRLLHSDYMNMTPRRPGPTRKHYQPYAPPRDFAAYRS

SEQ ID NO: 9737 - protein, 63 aa, -Artificial-Sequence
VAAILGLGLVLGLLGPLAILLALYLLRRDQRLPPDAHKPPGGGSFRTPIQEEQADAHSTLAKI

SEQ ID NO: 9738 - protein, 147 aa, -Artificial-Sequence
FWVLVVVGGVLACYSLLVTVAFIIFWVWRRKRKEKQSETSPKEFLTIYEDVKDLKTRRNHEQEQTFPGGGSTIYSMIQSQSSAPTSQEPAYTLYSLIQPSRKSGSRKRNHSPSFNSTIYEVIGKSQPKAQNPARLSRKELENFDVYS

SEQ ID NO: 9739 - protein, 93 aa, -Artificial-Sequence
SSSPMGIIVAVVTGIAVAAIVAAVVALIYCRKKRISALPGYPECREMGETLPEKPANPTNPDEADKVGAENTITYSLLMHPDALEEPDDQNRI

SEQ ID NO: 9740 - protein, 82 aa, -Artificial-Sequence
VLFYLAVGIMFLVNTVLWVTIRKELKRKKKWDLEISLDSGHEKKVISSLQEDRHLEEELKCQEQKEEQLQEGVHRKEPQGAT

SEQ ID NO: 9741 - protein, 23 aa, -Artificial-Sequence
YQVSFCLVMVLLFAVDTGLYFSV

SEQ ID NO: 9742 - protein, 23 aa, -Artificial-Sequence
YQVSFCLVMVLLFAVDTGLYFSV

SEQ ID NO: 9743 - protein, 27 aa, -Artificial-Sequence
YQVSFCLVMVLLFAVDTGLYFSVKTNI

SEQ ID NO: 9744 - protein, 21 aa, -Artificial-Sequence
AGTVLLLRAGFYAVSFLSVAV

SEQ ID NO: 9745 - protein, 21 aa, -Artificial-Sequence
LVPVFCGLLVAKSLVLSALLV

SEQ ID NO: 9746 - protein, 21 aa, -Artificial-Sequence
MGLAFLVLVALVWFLVEDWLS

SEQ ID NO: 9747 - protein, 21 aa, -Artificial-Sequence
LHILIGTSVVIILFILLFFLL

SEQ ID NO: 9748 - protein, 21 aa, -Artificial-Sequence
LHILIGTSVVIILFILLFFLL

SEQ ID NO: 9749 - protein, 20 aa, -Artificial-Sequence
VLIGTSVVIILFILLLFFLL

SEQ ID NO: 9750 - protein, 21 aa, -Artificial-Sequence
LHILIGTSVAIILFIILFFFL

SEQ ID NO: 9751 - protein, 21 aa, -Artificial-Sequence
LHILIGTSVAIILFIILFFFL

SEQ ID NO: 9752 - protein, 25 aa, -Artificial-Sequence
LHILIGTSVVIILFILLLFFLLHLW

SEQ ID NO: 9753 - protein, 20 aa, -Artificial-Sequence
VLIGTSVVIFLFILLLFFLL

SEQ ID NO: 9754 - protein, 20 aa, -Artificial-Sequence
VLIGTSVVIFLFILLLFFLL

SEQ ID NO: 9755 - protein, 21 aa, -Artificial-Sequence
HVLIGTSVVIIPFAILLFFLL

SEQ ID NO: 9756 - protein, 21 aa, -Artificial-Sequence
AVIRYSVAIILFTILPFFLLH

SEQ ID NO: 9757 - protein, 21 aa, -Artificial-Sequence
AVIRYSVAIILFTILPFFLLH

SEQ ID NO: 9758 - protein, 19 aa, -Artificial-Sequence
VLIGTSVVKIPFTILLFFL

SEQ ID NO: 9759 - protein, 20 aa, -Artificial-Sequence
VLIGTSVVKIPFTILLFFLL

SEQ ID NO: 9760 - protein, 19 aa, -Artificial-Sequence
VLIGTSVVKLPFTILLFFL

SEQ ID NO: 9761 - protein, 24 aa, -Artificial-Sequence
LHVLIGTSVVKIPFTILLFFLLHR

SEQ ID NO: 9762 - protein, 19 aa, -Artificial-Sequence
VLIGTSVVKLPFTILLFFL

SEQ ID NO: 9763 - protein, 22 aa, -Artificial-Sequence
LHILIGTSVVKIPFTILLFFLL

SEQ ID NO: 9764 - protein, 21 aa, -Artificial-Sequence
ILLLTLVSFLIFILFIIVQLF

SEQ ID NO: 9765 - protein, 22 aa, -Artificial-Sequence
LLGAMAATLVVICTAVIVVVAL

SEQ ID NO: 9766 - protein, 17 aa, -Artificial-Sequence
AQKLCEDVKIQYTDTKM

SEQ ID NO: 9767 - protein, 21 aa, -Artificial-Sequence
VLLCLLLVPLLLSLFVLGLFL

SEQ ID NO: 9768 - protein, 21 aa, -Artificial-Sequence
ILVIFSGMFLVFTLAGALFLH

SEQ ID NO: 9769 - protein, 21 aa, -Artificial-Sequence
ILIGVSVVFLFCLLLLVLFCL

SEQ ID NO: 9770 - protein, 25 aa, -Artificial-Sequence
LGVVIGILVAVILLLLLLLLLFLIL

SEQ ID NO: 9771 - protein, 27 aa, -Artificial-Sequence
IISFFLALTSTALLFLLFFLTLRFSVV

SEQ ID NO: 9772 - protein, 27 aa, -Artificial-Sequence
FWVLVVVGGVLACYSLLVTVAFIIFWV

SEQ ID NO: 9773 - protein, 21 aa, -Artificial-Sequence
VAAILGLGLVLGLLGPLAILL

SEQ ID NO: 9774 - protein, 27 aa, -Artificial-Sequence
FWVLVVVGGVLACYSLLVTVAFIIFWV

SEQ ID NO: 9775 - protein, 23 aa, -Artificial-Sequence
SSSPMGIIVAVVTGIAVAAIVAA

SEQ ID NO: 9776 - protein, 21 aa, -Artificial-Sequence
VLFYLAVGIMFLVNTVLWVTI

SEQ ID NO: 9777 - protein, 25 aa, -Artificial-Sequence
KTNIRSSTRDWKDHKFKWRKDPQDK

SEQ ID NO: 9778 - protein, 25 aa, -Artificial-Sequence
KTNIRSSTRDWKDHKFKWRKDPQDK

SEQ ID NO: 9779 - protein, 4 aa, -Artificial-Sequence
KTNI

SEQ ID NO: 9780 - protein, 45 aa, -Artificial-Sequence; identical to SEQ ID NO: 3774

SEQ ID NO: 9781 - protein, 63 aa, -Artificial-Sequence; identical to SEQ ID NO: 3781

SEQ ID NO: 9782 - protein, 25 aa, -Artificial-Sequence
RKRTRERASRASTWEGRRRLNTQTL

SEQ ID NO: 9783 - protein, 84 aa, -Artificial-Sequence
HRWCSNKKNAAVMDQESAGNRTANSEDSDEQDPQEVTYTQLNHCVFTQRKITRPSQRPKTPPTDIIVYTELPNAESRSKVVSCP

SEQ ID NO: 9784 - protein, 84 aa, -Artificial-Sequence; identical to SEQ ID NO: 9783

SEQ ID NO: 9785 - protein, 76 aa, -Artificial-Sequence
HRWCCNKKNAVVMDQEPAGNRTVNREDSDEQDPQEVTYAQLNHCVFTQRKITRPSQRPKTPPTDIIVYTELPNAEP

SEQ ID NO: 9786 - protein, 116 aa, -Artificial-Sequence
LHCCCSNKKNAAVMDQEPAGDRTVNREDSDDQDPQEVTYAQLDHCVFTQTKITSPSQRPKTPPTDTTMYMELPNAKPRSLSPAHKHHSQALRGSSRETTALSQNRVASSHVPAAGI

SEQ ID NO: 9787 - protein, 116 aa, -Artificial-Sequence
LHCCCSNKKNAAVMDQGPAGDRTVNREDSDDQDPQEVTYAQLDHCVFTQTKITSPSQRPKAPPTDTTMYMELPNAKPRSLSPAHKHHSQALRGSSRETTALSQNRVASSHVPAAGI

SEQ ID NO: 9788 - protein, 81 aa, -Artificial-Sequence
CSNKKNAAVMDQEPAGNRTANSEDSDEQDPEEVTYAQLDHCVFTQRKITRPSQRPKTPPTDTILYTELPNAKPRSKVVSCP

SEQ ID NO: 9789 - protein, 95 aa, -Artificial-Sequence
YRWCSNKKNAAVMDQEPAGDRTVNRQDSDEQDPQEVTYAQLDHCVFIQRKISRPSQRPKTPLTDTSVYTELPNAEPRSKVVSCPRAPQSGLEGVF

SEQ ID NO: 9790 - protein, 95 aa, -Artificial-Sequence; identical to SEQ ID NO: 9789

SEQ ID NO: 9791 - protein, 67 aa, -Artificial-Sequence
HRWCANKKNAVVMDQEPAGNRTVNREDSDEQDPQEVTYAQLNHCVFTQRKITRPSQRPKTPPTDTSV

SEQ ID NO: 9792 - protein, 114 aa, -Artificial-Sequence
RWCSKKKNAAVMNQEPAGHRTVNREDSDEQDPQEVTYAQLDHCIFTQRKITGPSQRSKRPSTDTSVCIELPNAEPRALSPAHEHHSQALMGSSRETTALSQTQLASSNVPAAGI

SEQ ID NO: 9793 - protein, 10 aa, -Artificial-Sequence
RWCSKKKMLL

SEQ ID NO: 9794 - protein, 40 aa, -Artificial-Sequence
LHRWCSDKKNAAVMDQEPAGNRTVNSEDSDEQDHQEVSYA

SEQ ID NO: 9795 - protein, 39 aa, -Artificial-Sequence
HRWCSNKKNAAVMDQEPAGNRTVNSEDSDEQDHQEVSYA

SEQ ID NO: 9796 - protein, 40 aa, -Artificial-Sequence
LHRWCSDKKNASVMDQGPAGNRTVNREDSDEQDHQEVSYA

SEQ ID NO: 9797 - protein, 39 aa, -Artificial-Sequence
HRWCSDKKNAAVMDQEPAGNRTVNSEDSDEQDHQEVSYA

SEQ ID NO: 9798 - protein, 40 aa, -Artificial-Sequence
LHRWCSNKKNASVMDQGPAGNRTVNREDSDEQDHQEVSYA

SEQ ID NO: 9799 - protein, 22 aa, -Artificial-Sequence
HRWCSNKKKCCCNGPRACREQK

SEQ ID NO: 9800 - protein, 85 aa, -Artificial-Sequence
IMKLRKAHVIWKKENEVSEHTLESYRSRSNNEETSSEEKNGQSSHPMRCMNYITKLYSEAKTKRKENVQHSKLEEKHIQVPESIV

SEQ ID NO: 9801 - protein, 81 aa, -Artificial-Sequence
TRKKKALRIHSVEGDLRRKSAGQEEWSPSAPSPPGSCVQAEAAPAGLCGEQRGEDCAELHDYFNVLSYRSLGNCSFFTETG

SEQ ID NO: 9802 - protein, 106 aa, -Artificial-Sequence
ILFMVSGICIVFGFIILLLLVLRKRRDSLSLSTQRTQGPAESARNLEYVSVSPTNNTVYASVTHSNRETEIWTPRENDTITIYSTINHSKESKPTFSRATALDNVV

SEQ ID NO: 9803 - protein, 335 aa, -Artificial-Sequence
MAGSPTCLTLIYILWQLTGSAASGPVKELVGSVGGAVTFPLKSKVKQVDSIVWTFNTTPLVTIQPEGGTIIVTQNRNRERVDFPDGGYSLKLSKLKKNDSGIYYVGIYSSSLQQPSTQEYVLHVYEHLSKPKVTMGLQSNKNGTCVTNLTCCMEHGEEDVIYTWKALGQAANESHNGSILPISWRWGESDMTFICVARNPVSRNFSSPILARKLCEGAADDPDSSMVLLCLLLVPLLLSLFVLGLFLWFLKRERQEEYIEEKKRVDICRETPNICPHSGENTEYDTIPHTNRTILKEDPANTVYSTVEIPKKMENPHSLLTMPDTPRLFAYENVI

SEQ ID NO: 9804 - protein, 48 aa, -Artificial-Sequence
QRRKYRSNKGESPVEPAEPCHYSCPREEEGSTIPIQEDYRKPEPACSP

SEQ ID NO: 9805 - protein, 101 aa, -Artificial-Sequence
HRQNQIKQGPPRSKDEEQKPQQRPDLAVDVLERTADKATVNGLPEKDRETDTSALAAGSSQEVTYAQLDHWALTQRTARAVSPQSTKPMAESITYAAVARH

SEQ ID NO: 9806 - protein, 168 aa, -Artificial-Sequence
RHRRQGKHWTSTQRKADFQHPAGAVGPEPTDRGLQWRSSPAADAQEENLYAAVKHTQPEDGVEMDTRQSPHDEDPQAVTYAEVKHSRPRREMASPPSPLSGEFLDTKDRQAEEDRQMDTEAAASEAPQDVTYAQLHSLTLRREATEPPPSQEGPSPAVPSIYATLAIH

SEQ ID NO: 9807 - protein, 42 aa, -Artificial-Sequence; identical to SEQ ID NO: 3486

SEQ ID NO: 9808 - protein, 41 aa, -Artificial-Sequence; identical to SEQ ID NO: 3485

SEQ ID NO: 9809 - protein, 42 aa, -Artificial-Sequence
ALYLLRRDQRLPPDAHKPPGGGSFRTPIQEEQADAHSTLAKI

SEQ ID NO: 9810 - protein, 120 aa, -Artificial-Sequence; identical to SEQ ID NO: 3821

SEQ ID NO: 9811 - protein, 70 aa, -Artificial-Sequence
VVALIYCRKKRISALPGYPECREMGETLPEKPANPTNPDEADKVGAENTITYSLLMHPDALEEPDDQNRI

SEQ ID NO: 9812 - protein, 61 aa, -Artificial-Sequence
RKELKRKKKWDLEISLDSGHEKKVISSLQEDRHLEEELKCQEQKEEQLQEGVHRKEPQGAT

SEQ ID NO: 9813 - protein, 143 aa, -Artificial-Sequence; identical to SEQ ID NO: 3483

SEQ ID NO: 9814 - protein, 185 aa, -Artificial-Sequence; identical to SEQ ID NO: 3494

SEQ ID NO: 9815 - protein, 184 aa, -Artificial-Sequence; identical to SEQ ID NO: 3493

SEQ ID NO: 9816 - protein, 179 aa, -Artificial-Sequence
QSFGLLDPKLCYLLDGILFIYGVILTALFLRDQRLPPDAHKPPGGGSFRTPIQEEQADAHSTLAKIRVKFSRSADAPAYQQGQNQLYNELNLGRREEYDVLDKRRGRDPEMGGKPQRRKNPQEGLYNELQKDKMAEAYSEIGMKGERRRGKGHDGLYQGLSTATKDTYDALHMQALPPR

SEQ ID NO: 9817 - protein, 263 aa, -Artificial-Sequence
QSFGLLDPKLCYLLDGILFIYGVILTALFLWRRKRKEKQSETSPKEFLTIYEDVKDLKTRRNHEQEQTFPGGGSTIYSMIQSQSSAPTSQEPAYTLYSLIQPSRKSGSRKRNHSPSFNSTIYEVIGKSQPKAQNPARLSRKELENFDVYSRVKFSRSADAPAYQQGQNQLYNELNLGRREEYDVLDKRRGRDPEMGGKPQRRKNPQEGLYNELQKDKMAEAYSEIGMKGERRRGKGHDGLYQGLSTATKDTYDALHMQALPPR

SEQ ID NO: 9818 - protein, 184 aa, -Artificial-Sequence; identical to SEQ ID NO: 3493

SEQ ID NO: 9819 - protein, 185 aa, -Artificial-Sequence; identical to SEQ ID NO: 3494

SEQ ID NO: 9820 - protein, 184 aa, -Artificial-Sequence; identical to SEQ ID NO: 3493

SEQ ID NO: 9821 - protein, 185 aa, -Artificial-Sequence; identical to SEQ ID NO: 3494

SEQ ID NO: 9822 - protein, 143 aa, -Artificial-Sequence
QSFGLLDPKLSYLLDGILFIYGVILTALFLRVKFSRSADAPAYQQGQNQLYNELNLGRREEYDVLDKRRGRDPEMGGKPQRRKNPQEGLYNELQKDKMAEAYSEIGMKGERRRGKGHDGLYQGLSTATKDTYDALHMQALPPR

SEQ ID NO: 9823 - protein, 143 aa, -Artificial-Sequence; identical to SEQ ID NO: 9822

SEQ ID NO: 9824 - protein, 143 aa, -Artificial-Sequence
QSFGLLDPKLCYLLDGILFIYGVILTALFLRVKFSRSADAPAYQQGQNQLYNELNLGRREEYDVLDKRRGRDPEMGGKPQRRKNPQEGLFNELQKDKMAEAFSEIGMKGERRRGKGHDGLFQGLSTATKDTFDALHMQALPPR

SEQ ID NO: 9825 - protein, 74 aa, -Artificial-Sequence; identical to SEQ ID NO: 3743

SEQ ID NO: 9826 - protein, 116 aa, -Artificial-Sequence
TTPGERSSLPAFYPGTSGSCSGCGSLSLPLLAGLVAADAVASLLIVGAVFKRGRKKLLYIFKQPFMRPVQTTQEEDGCSCRFPEEEEGGCELLCARPRRSPAQEDGKVYINMPGRG

SEQ ID NO: 9827 - protein, 115 aa, -Artificial-Sequence
TTPGERSSLPAFYPGTSGSCSGCGSLSLPLLAGLVAADAVASLLIVGAVFRSKRSRLLHSDYMNMTPRRPGPTRKHYQPYAPPRDFAAYRSLCARPRRSPAQEDGKVYINMPGRG

SEQ ID NO: 9828 - protein, 110 aa, -Artificial-Sequence
TTPGERSSLPAFYPGTSGSCSGCGSLSLPLLAGLVAADAVASLLIVGAVFRDQRLPPDAHKPPGGGSFRTPIQEEQADAHSTLAKILCARPRRSPAQEDGKVYINMPGRG

SEQ ID NO: 9829 - protein, 194 aa, -Artificial-Sequence
TTPGERSSLPAFYPGTSGSCSGCGSLSLPLLAGLVAADAVASLLIVGAVFWRRKRKEKQSETSPKEFLTIYEDVKDLKTRRNHEQEQTFPGGGSTIYSMIQSQSSAPTSQEPAYTLYSLIQPSRKSGSRKRNHSPSFNSTIYEVIGKSQPKAQNPARLSRKELENFDVYSLCARPRRSPAQEDGKVYINMPGRG

SEQ ID NO: 9830 - protein, 110 aa, -Artificial-Sequence
LGEPQLCYILDAILFLYGIVLTLLYCKRGRKKLLYIFKQPFMRPVQTTQEEDGCSCRFPEEEEGGCELRLKIQVRKAAITSYEKSDGVYTGLSTRNQETYETLKHEKPPQ

SEQ ID NO: 9831 - protein, 109 aa, -Artificial-Sequence
LGEPQLCYILDAILFLYGIVLTLLYCRSKRSRLLHSDYMNMTPRRPGPTRKHYQPYAPPRDFAAYRSRLKIQVRKAAITSYEKSDGVYTGLSTRNQETYETLKHEKPPQ

SEQ ID NO: 9832 - protein, 104 aa, -Artificial-Sequence
LGEPQLCYILDAILFLYGIVLTLLYCRDQRLPPDAHKPPGGGSFRTPIQEEQADAHSTLAKIRLKIQVRKAAITSYEKSDGVYTGLSTRNQETYETLKHEKPPQ

SEQ ID NO: 9833 - protein, 188 aa, -Artificial-Sequence
LGEPQLCYILDAILFLYGIVLTLLYCWRRKRKEKQSETSPKEFLTIYEDVKDLKTRRNHEQEQTFPGGGSTIYSMIQSQSSAPTSQEPAYTLYSLIQPSRKSGSRKRNHSPSFNSTIYEVIGKSQPKAQNPARLSRKELENFDVYSRLKIQVRKAAITSYEKSDGVYTGLSTRNQETYETLKHEKPPQ

SEQ ID NO: 9834 - protein, 110 aa, -Artificial-Sequence; identical to SEQ ID NO: 9830

SEQ ID NO: 9835 - protein, 109 aa, -Artificial-Sequence; identical to SEQ ID NO: 9831

SEQ ID NO: 9836 - protein, 68 aa, -Artificial-Sequence; identical to SEQ ID NO: 3817

SEQ ID NO: 9837 - protein, 68 aa, -Artificial-Sequence; identical to SEQ ID NO: 3817

SEQ ID NO: 9838 - protein, 86 aa, -Artificial-Sequence; identical to SEQ ID NO: 3756

SEQ ID NO: 9839 - protein, 86 aa, -Artificial-Sequence; identical to SEQ ID NO: 3760

SEQ ID NO: 9840 - protein, 128 aa, -Artificial-Sequence
QAQSDCSCSTVSPGVLAGIVMGDLVLTVLIALAVYFLGRLVPRGRGAAEAATRKQRITETESPYQELQGQRSDVYSDLNTQKRGRKKLLYIFKQPFMRPVQTTQEEDGCSCRFPEEEEGGCELRPYYK

SEQ ID NO: 9841 - protein, 127 aa, -Artificial-Sequence
QAQSDCSCSTVSPGVLAGIVMGDLVLTVLIALAVYFLGRLVPRGRGAAEAATRKQRITETESPYQELQGQRSDVYSDLNTQRSKRSRLLHSDYMNMTPRRPGPTRKHYQPYAPPRDFAAYRSRPYYK

SEQ ID NO: 9842 - protein, 122 aa, -Artificial-Sequence
QAQSDCSCSTVSPGVLAGIVMGDLVLTVLIALAVYFLGRLVPRGRGAAEAATRKQRITETESPYQELQGQRSDVYSDLNTQRDQRLPPDAHKPPGGGSFRTPIQEEQADAHSTLAKIRPYYK

SEQ ID NO: 9843 - protein, 206 aa, -Artificial-Sequence
QAQSDCSCSTVSPGVLAGIVMGDLVLTVLIALAVYFLGRLVPRGRGAAEAATRKQRITETESPYQELQGQRSDVYSDLNTQWRRKRKEKQSETSPKEFLTIYEDVKDLKTRRNHEQEQTFPGGGSTIYSMIQSQSSAPTSQEPAYTLYSLIQPSRKSGSRKRNHSPSFNSTIYEVIGKSQPKAQNPARLSRKELENFDVYSRPYYK

SEQ ID NO: 9844 - protein, 190 aa, -Artificial-Sequence
TTPGERSSLPAFYPGTSGSCSGCGSLSLPLLAGLVAADAVASLLIVGAVFLCARPRRSPAQEDGKVYINMPGRGSSRRVKFSRSADAPAYQQGQNQLYNELNLGRREEYDVLDKRRGRDPEMGGKPQRRKNPQEGLYNELQKDKMAEAYSEIGMKGERRRGKGHDGLYQGLSTATKDTYDALHMQALPPR

SEQ ID NO: 9845 - protein, 194 aa, -Artificial-Sequence
QAQSDCSCSTVSPGVLAGIVMGDLVLTVLIALAVYFLGRLVPRGRGAAEAATRKQRITETESPYQELQGQRSDVYSDLNTQRVKFSRSADAPAYQQGQNQLYNELNLGRREEYDVLDKRRGRDPEMGGKPQRRKNPQEGLYNELQKDKMAEAYSEIGMKGERRRGKGHDGLYQGLSTATKDTYDALHMQALPPR

SEQ ID NO: 9846 - protein, 116 aa, -Artificial-Sequence; identical to SEQ ID NO: 9826

SEQ ID NO: 9847 - protein, 115 aa, -Artificial-Sequence; identical to SEQ ID NO: 9827

SEQ ID NO: 9848 - protein, 134 aa, -Artificial-Sequence
LCYLLDGILFIYGVILTALFLRVKFSRSADAPAYQQGQNQLYNELNLGRREEYDVLDKRRGRDPEMGGKPQRRKNPQEGLYNELQKDKMAEAYSEIGMKGERRRGKGHDGLYQGLSTATKDTYDALHMQALPPR

SEQ ID NO: 9849 - protein, 63 aa, -Artificial-Sequence
LCYILDAILFLYGIVLTLLYCRLKIQVRKAAITSYEKSDGVYTGLSTRNQETYETLKHEKPPQ

SEQ ID NO: 9850 - protein, 45 aa, -Artificial-Sequence
LLAGLVAADAVASLLIVGAVFLCARPRRSPAQEDGKVYINMPGRG

SEQ ID NO: 9851 - protein, 73 aa, -Artificial-Sequence
GVLAGIVMGDLVLTVLIALAVYFLGRLVPRGRGAAEAATRKQRITETESPYQELQGQRSDVYSDLNTQRPYYK

SEQ ID NO: 9852 - protein, 21 aa, -Artificial-Sequence
LCYLLDGILFIYGVILTALFL

SEQ ID NO: 9853 - protein, 21 aa, -Artificial-Sequence
LCYILDAILFLYGIVLTLLYC

SEQ ID NO: 9854 - protein, 22 aa, -Artificial-Sequence
LLAGLVAADAVASLLIVGAVFL

SEQ ID NO: 9855 - protein, 21 aa, -Artificial-Sequence
GVLAGIVMGDLVLTVLIALAV

SEQ ID NO: 9856 - protein, 113 aa, -Artificial-Sequence; identical to SEQ ID NO: 3489

SEQ ID NO: 9857 - protein, 42 aa, -Artificial-Sequence; identical to SEQ ID NO: 3954

SEQ ID NO: 9858 - protein, 24 aa, -Artificial-Sequence
LCARPRRSPAQEDGKVYINMPGRG

SEQ ID NO: 9859 - protein, 52 aa, -Artificial-Sequence
YFLGRLVPRGRGAAEAATRKQRITETESPYQELQGQRSDVYSDLNTQRPYYK

SEQ ID NO: 9860 - protein, 505 aa, -Artificial-Sequence
MALPVTALLLPLALLLHAARPDIQMTQSPSSLSASVGDRVTITCKASDHINNWLAWYQQKPGQAPKLLIYGATTLETGVPSRFSGSGSGTDYTLTISSLQPEDFATYYCQQSWNTPWTFGQGTKLEIKRGGGGSGGGGSGGGGSQVQLQQPGAELVKPGASVKMSCKASGYAFSSYWINWMKQKPGQGLEWIGQIYPGDGDTNYNGKFKGRATLTADTSSSTAYMQLSSLTSEDSAVYFCARSITTVVGCAMDYWGQGTSVTVSSTRGMRTEDLPKAVVFLEPQWYRVLEKDSVTLKCQGAYSPEDNSTQWFHNESLISSQASSYFIDAATVDDSGEYRCQTNLSTLSDPVQLEVHIGWLLLQAPRWVFKEEDPIHLRCHSWKNTALHKVTYLQNGKGRKYFHHNSDFYIPKATLKDSGSYFCRGLVGSKNVSSETVNITITQGLAVSTISSFFPPGYQVSFCLVMVLLFAVDTGLYFSVKTNIRSSTRDWKDHKFKWRKDPQDK

SEQ ID NO: 9861 - protein, 505 aa, -Artificial-Sequence; identical to SEQ ID NO: 5254

SEQ ID NO: 9862 - protein, 484 aa, -Artificial-Sequence
MALPVTALLLPLALLLHAARPDIQMTQSPSSLSASVGDRVTITCKASDHINNWLAWYQQKPGQAPKLLIYGATTLETGVPSRFSGSGSGTDYTLTISSLQPEDFATYYCQQSWNTPWTFGQGTKLEIKRGGGGSGGGGSGGGGSQVQLQQPGAELVKPGASVKMSCKASGYAFSSYWINWMKQKPGQGLEWIGQIYPGDGDTNYNGKFKGRATLTADTSSSTAYMQLSSLTSEDSAVYFCARSITTVVGCAMDYWGQGTSVTVSSTRGMRTEDLPKAVVFLEPQWYSVLEKDSVTLKCQGAYSPEDNSTQWFHNENLISSQASSYFIDAATVNDSGEYRCQTNLSTLSDPVQLEVHIGWLLLQAPRWVFKEEDPIHLRCHSWKNTALHKVTYLQNGKDRKYFHHNSDFHIPKATLKDSGSYFCRGLVGSKNVSSETVNITITQGLAVSTISSFSPPGYQVSFCLVMVLLFAVDTGLYFSVKTNI

SEQ ID NO: 9863 - protein, 450 aa, -Artificial-Sequence
MALPVTALLLPLALLLHAARPDIQMTQSPSSLSASVGDRVTITCKASDHINNWLAWYQQKPGQAPKLLIYGATTLETGVPSRFSGSGSGTDYTLTISSLQPEDFATYYCQQSWNTPWTFGQGTKLEIKRGGGGSGGGGSGGGGSQVQLQQPGAELVKPGASVKMSCKASGYAFSSYWINWMKQKPGQGLEWIGQIYPGDGDTNYNGKFKGRATLTADTSSSTAYMQLSSLTSEDSAVYFCARSITTVVGCAMDYWGQGTSVTVSSTRLWVSQPPEIRTLEGSSAFLPCSFNASQGRLAIGSVTWFRDEVVPGKEVRNGTPEFRGRLAPLASSRFLHDHQAELHIRDVRGHDASIYVCRVEVLGLGVGTGNGTRLVVEKEHPQLGAGTVLLLRAGFYAVSFLSVAVGSTVYYQGKCLTWKGPRRQLPAVVPAPLPPPCGSSAHLLPPVPGG

SEQ ID NO: 9864 - protein, 522 aa, -Artificial-Sequence
MALPVTALLLPLALLLHAARPDIQMTQSPSSLSASVGDRVTITCKASDHINNWLAWYQQKPGQAPKLLIYGATTLETGVPSRFSGSGSGTDYTLTISSLQPEDFATYYCQQSWNTPWTFGQGTKLEIKRGGGGSGGGGSGGGGSQVQLQQPGAELVKPGASVKMSCKASGYAFSSYWINWMKQKPGQGLEWIGQIYPGDGDTNYNGKFKGRATLTADTSSSTAYMQLSSLTSEDSAVYFCARSITTVVGCAMDYWGQGTSVTVSSTRQSKAQVLQSVAGQTLTVRCQYPPTGSLYEKKGWCKEASALVCIRLVTSSKPRTMAWTSRFTIWDDPDAGFFTVTMTDLREEDSGHYWCRIYRPSDNSVSKSVRFYLVVSPASASTQTSWTPRDLVSSQTQTQSCVPPTAGARQAPESPSTIPVPSQPQNSTLRPGPAAPIALVPVFCGLLVAKSLVLSALLVWWGDIWWKTMMELRSLDTQKATCHLQQVTDLPWTSVSSPVEREILYHTVARTKISDDDDEHTL

SEQ ID NO: 9865 - protein, 550 aa, -Artificial-Sequence
MALPVTALLLPLALLLHAARPDIQMTQSPSSLSASVGDRVTITCKASDHINNWLAWYQQKPGQAPKLLIYGATTLETGVPSRFSGSGSGTDYTLTISSLQPEDFATYYCQQSWNTPWTFGQGTKLEIKRGGGGSGGGGSGGGGSQVQLQQPGAELVKPGASVKMSCKASGYAFSSYWINWMKQKPGQGLEWIGQIYPGDGDTNYNGKFKGRATLTADTSSSTAYMQLSSLTSEDSAVYFCARSITTVVGCAMDYWGQGTSVTVSSTRQQQTLPKPFIWAEPHFMVPKEKQVTICCQGNYGAVEYQLHFEGSLFAVDRPKPPERINKVQFYIPDMNSRMAGQYSCIYRVGELWSEPSNLLDLVVTEMYDTPTLSVHPGPEVISGEKVTFYCRLDTATSMFLLLKEGRSSHVQRGYGKVQAEFPLGPVTTAHRGTYRCFGSYNNHAWSFPSEPVKLLVTGDIENTSLAPEDPTFPADTWGTYLLTTETGLQKDHALWDHTAQNLLRMGLAFLVLVALVWFLVEDWLSRKRTRERASRASTWEGRRRLNTQTL

SEQ ID NO: 9866 - protein, 594 aa, -Artificial-Sequence
MALPVTALLLPLALLLHAARPDIQMTQSPSSLSASVGDRVTITCKASDHINNWLAWYQQKPGQAPKLLIYGATTLETGVPSRFSGSGSGTDYTLTISSLQPEDFATYYCQQSWNTPWTFGQGTKLEIKRGGGGSGGGGSGGGGSQVQLQQPGAELVKPGASVKMSCKASGYAFSSYWINWMKQKPGQGLEWIGQIYPGDGDTNYNGKFKGRATLTADTSSSTAYMQLSSLTSEDSAVYFCARSITTVVGCAMDYWGQGTSVTVSSTRHEGVHRKPSLLAHPGRLVKSEETVILQCWSDVMFEHFLLHREGMFNDTLRLIGEHHDGVSKANFSISRMTQDLAGTYRCYGSVTHSPYQVSAPSDPLDIVIIGLYEKPSLSAQLGPTVLAGENVTLSCSSRSSYDMYHLSREGEAHERRLPAGPKVNGTFQADFPLGPATHGGTYRCFGSFHDSPYEWSKSSDPLLVSVTGNPSNSWPSPTEPSSKTGNPRHLHILIGTSVVIILFILLFFLLHRWCSNKKNAAVMDQESAGNRTANSEDSDEQDPQEVTYTQLNHCVFTQRKITRPSQRPKTPPTDIIVYTELPNAESRSKVVSCP

SEQ ID NO: 9867 - protein, 594 aa, -Artificial-Sequence
MALPVTALLLPLALLLHAARPDIQMTQSPSSLSASVGDRVTITCKASDHINNWLAWYQQKPGQAPKLLIYGATTLETGVPSRFSGSGSGTDYTLTISSLQPEDFATYYCQQSWNTPWTFGQGTKLEIKRGGGGSGGGGSGGGGSQVQLQQPGAELVKPGASVKMSCKASGYAFSSYWINWMKQKPGQGLEWIGQIYPGDGDTNYNGKFKGRATLTADTSSSTAYMQLSSLTSEDSAVYFCARSITTVVGCAMDYWGQGTSVTVSSTRHEGVHRKPSLLAHPGRLVKSEETVILQCWSDVRFEHFLLHREGKFKDTLHLIGEHHDGVSKANFSIGPMMQDLAGTYRCYGSVTHSPYQLSAPSDPLDIVITGLYEKPSLSAQPGPTVLAGESVTLSCSSRSSYDMYHLSREGEAHECRFSAGPKVNGTFQADFPLGPATHGGTYRCFGSFRDSPYEWSNSSDPLLVSVTGNPSNSWPSPTEPSSKTGNPRHLHILIGTSVVIILFILLFFLLHRWCSNKKNAAVMDQESAGNRTANSEDSDEQDPQEVTYTQLNHCVFTQRKITRPSQRPKTPPTDIIVYTELPNAESRSKVVSCP

SEQ ID NO: 9868 - protein, 587 aa, -Artificial-Sequence
MALPVTALLLPLALLLHAARPDIQMTQSPSSLSASVGDRVTITCKASDHINNWLAWYQQKPGQAPKLLIYGATTLETGVPSRFSGSGSGTDYTLTISSLQPEDFATYYCQQSWNTPWTFGQGTKLEIKRGGGGSGGGGSGGGGSQVQLQQPGAELVKPGASVKMSCKASGYAFSSYWINWMKQKPGQGLEWIGQIYPGDGDTNYNGKFKGRATLTADTSSSTAYMQLSSLTSEDSAVYFCARSITTVVGCAMDYWGQGTSVTVSSTRHEGVHRKPSLLAHPGPLVKSEETVILQCWSDVRFQHFLLHREGKFKDTLHLIGEHHDGVSKANFSIGPMMQDLAGTYRCYGSVTHSPYQLSAPSDPLDIVITGLYEKPSLSAQPGPTVLAGESVTLSCSSRSSYDMYHLSREGEAHERRFSAGPKVNGTFQADFPLGPATHGGTYRCFGSFRDSPYEWSNSSDPLLVSVTGNPSNSWPSPTEPSSETGNPRHLHVLIGTSVVIILFILLLFFLLHRWCCNKKNAVVMDQEPAGNRTVNREDSDEQDPQEVTYAQLNHCVFTQRKITRPSQRPKTPPTDIIVYTELPNAEP

SEQ ID NO: 9869 - protein, 621 aa, -Artificial-Sequence
MALPVTALLLPLALLLHAARPDIQMTQSPSSLSASVGDRVTITCKASDHINNWLAWYQQKPGQAPKLLIYGATTLETGVPSRFSGSGSGTDYTLTISSLQPEDFATYYCQQSWNTPWTFGQGTKLEIKRGGGGSGGGGSGGGGSQVQLQQPGAELVKPGASVKMSCKASGYAFSSYWINWMKQKPGQGLEWIGQIYPGDGDTNYNGKFKGRATLTADTSSSTAYMQLSSLTSEDSAVYFCARSITTVVGCAMDYWGQGTSVTVSSTRHEGGQDKPLLSAWPSAVVPRGGHVTLLCRSRLGFTIFSLYKEDGVPVPELYNKIFWKSILMGPVTPAHAGTYRCRGSHPRSPIEWSAPSNPLVIVVTGLFGKPSLSAQPGPTVRTGENVTLSCSSRSSFDMYHLSREGRAHEPRLPAVPSVNGTFQADFPLGPATHGGTYTCFGSLHDSPYEWSDPSDPLLVSVTGNSSSSSSSPTEPSSKTGIRRHLHILIGTSVAIILFIILFFFLLHCCCSNKKNAAVMDQEPAGDRTVNREDSDDQDPQEVTYAQLDHCVFTQTKITSPSQRPKTPPTDTTMYMELPNAKPRSLSPAHKHHSQALRGSSRETTALSQNRVASSHVPAAGI

SEQ ID NO: 9870 - protein, 621 aa, -Artificial-Sequence
MALPVTALLLPLALLLHAARPDIQMTQSPSSLSASVGDRVTITCKASDHINNWLAWYQQKPGQAPKLLIYGATTLETGVPSRFSGSGSGTDYTLTISSLQPEDFATYYCQQSWNTPWTFGQGTKLEIKRGGGGSGGGGSGGGGSQVQLQQPGAELVKPGASVKMSCKASGYAFSSYWINWMKQKPGQGLEWIGQIYPGDGDTNYNGKFKGRATLTADTSSSTAYMQLSSLTSEDSAVYFCARSITTVVGCAMDYWGQGTSVTVSSTRHEGGQDKPLLSAWPSAVVPRGGHVTLLCRSRLGFTIFSLYKEDGVPVPELYNKIFWKSILMGPVTPAHAGTYRCRGSHPRSPIEWSAPSNPLVIVVTGLFGKPSLSAQPGPTVRTGENVALSCSSRSSFDMYHLSREGRAHEPRLPAVPSVDGTFQADFPLGPATHGGTYTCFSSLHDSPYEWSDPSDPLLVSVTGNSSSSSSSPTEPSSKTGIRRHLHILIGTSVAIILFIILFFFLLHCCCSNKKNAAVMDQGPAGDRTVNREDSDDQDPQEVTYAQLDHCVFTQTKITSPSQRPKAPPTDTTMYMELPNAKPRSLSPAHKHHSQALRGSSRETTALSQNRVASSHVPAAGI

SEQ ID NO: 9871 - protein, 693 aa, -Artificial-Sequence
MALPVTALLLPLALLLHAARPDIQMTQSPSSLSASVGDRVTITCKASDHINNWLAWYQQKPGQAPKLLIYGATTLETGVPSRFSGSGSGTDYTLTISSLQPEDFATYYCQQSWNTPWTFGQGTKLEIKRGGGGSGGGGSGGGGSQVQLQQPGAELVKPGASVKMSCKASGYAFSSYWINWMKQKPGQGLEWIGQIYPGDGDTNYNGKFKGRATLTADTSSSTAYMQLSSLTSEDSAVYFCARSITTVVGCAMDYWGQGTSVTVSSTRAGPHVGGQDKPFLSAWPSAVVPRGGHVTLRCHYRHRFNNFMLYKEDRIHVPIFHGRLFQESFNMSPVTTAHAGNYTCRGSHPHSPTGWSAPSNPVVIMVTGNHRKPSLLAHPGPLVKSGERVILQCWSDIMFEHFFLHKEGISKDPSRLVGQIHDGVSKANFSIGPMMLALAGTYRCYGSVTHTPYQLSAPSDPLDIVVTGPYEKPSLSAQPGPKVQAGESVTLSCSSRSSYDMYHLSREGGAHERRLPAVRKVNRTFQADFPLGPATHGGTYRCFGSFRHSPYEWSDPSDPLLVSVTGNPSSSWPSPTEPSSKSGNPRHLHILIGTSVVIILFILLLFFLLHLWCSNKKNAAVMDQEPAGNRTANSEDSDEQDPEEVTYAQLDHCVFTQRKITRPSQRPKTPPTDTILYTELPNAKPRSKVVSCP

SEQ ID NO: 9872 - protein, 684 aa, -Artificial-Sequence
MALPVTALLLPLALLLHAARPDIQMTQSPSSLSASVGDRVTITCKASDHINNWLAWYQQKPGQAPKLLIYGATTLETGVPSRFSGSGSGTDYTLTISSLQPEDFATYYCQQSWNTPWTFGQGTKLEIKRGGGGSGGGGSGGGGSQVQLQQPGAELVKPGASVKMSCKASGYAFSSYWINWMKQKPGQGLEWIGQIYPGDGDTNYNGKFKGRATLTADTSSSTAYMQLSSLTSEDSAVYFCARSITTVVGCAMDYWGQGTSVTVSSTRLMGGQDKPFLSARPSTVVPRGGHVALQCHYRRGFNNFMLYKEDRSHVPIFHGRIFQESFIMGPVTPAHAGTYRCRGSRPHSLTGWSAPSNPLVIMVTGNHRKPSLLAHPGPLLKSGETVILQCWSDVMFEHFFLHREGISEDPSRLVGQIHDGVSKANFSIGPLMPVLAGTYRCYGSVPHSPYQLSAPSDPLDIVITGLYEKPSLSAQPGPTVQAGENVTLSCSSWSSYDIYHLSREGEAHERRLRAVPKVNRTFQADFPLGPATHGGTYRCFGSFRALPCVWSNSSDPLLVSVTGICRHLHVLIGTSVVIFLFILLLFFLLYRWCSNKKNAAVMDQEPAGDRTVNRQDSDEQDPQEVTYAQLDHCVFIQRKISRPSQRPKTPLTDTSVYTELPNAEPRSKVVSCPRAPQSGLEGVF

SEQ ID NO: 9873 - protein, 701 aa, -Artificial-Sequence
MALPVTALLLPLALLLHAARPDIQMTQSPSSLSASVGDRVTITCKASDHINNWLAWYQQKPGQAPKLLIYGATTLETGVPSRFSGSGSGTDYTLTISSLQPEDFATYYCQQSWNTPWTFGQGTKLEIKRGGGGSGGGGSGGGGSQVQLQQPGAELVKPGASVKMSCKASGYAFSSYWINWMKQKPGQGLEWIGQIYPGDGDTNYNGKFKGRATLTADTSSSTAYMQLSSLTSEDSAVYFCARSITTVVGCAMDYWGQGTSVTVSSTRLMGGQDKPFLSARPSTVVPRGGHVALQCHYRRGFNNFMLYKEDRSHVPIFHGRIFQESFIMGPVTPAHAGTYRCRGSRPHSLTGWSAPSNPLVIMVTGNHRKPSLLAHPGPLLKSGETVILQCWSDVMFEHFFLHREGISEDPSRLVGQIHDGVSKANFSIGPLMPVLAGTYRCYGSVPHSPYQLSAPSDPLDIVITGLYEKPSLSAQPGPTVQAGENVTLSCSSWSSYDIYHLSREGEAHERRLRAVPKVNRTFQADFPLGPATHGGTYRCFGSFRALPCVWSNSSDPLLVSVTGNPSSSWPSPTEPSSKSGICRHLHVLIGTSVVIFLFILLLFFLLYRWCSNKKNAAVMDQEPAGDRTVNRQDSDEQDPQEVTYAQLDHCVFIQRKISRPSQRPKTPLTDTSVYTELPNAEPRSKVVSCPRAPQSGLEGVF

SEQ ID NO: 9874 - protein, 652 aa, -Artificial-Sequence
MALPVTALLLPLALLLHAARPDIQMTQSPSSLSASVGDRVTITCKASDHINNWLAWYQQKPGQAPKLLIYGATTLETGVPSRFSGSGSGTDYTLTISSLQPEDFATYYCQQSWNTPWTFGQGTKLEIKRGGGGSGGGGSGGGGSQVQLQQPGAELVKPGASVKMSCKASGYAFSSYWINWMKQKPGQGLEWIGQIYPGDGDTNYNGKFKGRATLTADTSSSTAYMQLSSLTSEDSAVYFCARSITTVVGCAMDYWGQGTSVTVSSTRQDKPFLSAWPGTVVSEGQHVTLQCRSRLGFNEFSLSKEDGMPVPELYNRIFRNSFLMGPVTPAHAGTYRCCSSHPHSPTGWSAPSNPVVIMVTGVHRKPSLLAHPGPLVKSGETVILQCWSDVRFERFLLHREGITEDPLRLVGQLHDAGSQVNYSMGPMTPALAGTYRCFGSVTHLPYELSAPSDPLDIVVVGLYGKPSLSAQPGPTVQAGENVTLSCSSRSLFDIYHLSREAEAGELRLTAVLRVNGTFQANFPLGPVTHGGNYRCFGSFRALPHAWSDPSDPLPVSVTGNSRNLHVLIGTSVVIIPFAILLFFLLHRWCANKKNAVVMDQEPAGNRTVNREDSDEQDPQEVTYAQLNHCVFTQRKITRPSQRPKTPPTDTSV

SEQ ID NO: 9875 - protein, 623 aa, -Artificial-Sequence
MALPVTALLLPLALLLHAARPDIQMTQSPSSLSASVGDRVTITCKASDHINNWLAWYQQKPGQAPKLLIYGATTLETGVPSRFSGSGSGTDYTLTISSLQPEDFATYYCQQSWNTPWTFGQGTKLEIKRGGGGSGGGGSGGGGSQVQLQQPGAELVKPGASVKMSCKASGYAFSSYWINWMKQKPGQGLEWIGQIYPGDGDTNYNGKFKGRATLTADTSSSTAYMQLSSLTSEDSAVYFCARSITTVVGCAMDYWGQGTSVTVSSTRWAHVGGQDKPFCSAWPSAVVPQGGHVTLRCHYRRGFNIFTLYKKDGVPVPELYNRIFWNSFLISPVTPAHAGTYRCRGFHPHSPTEWSAPSNPLVIMVTGLYEKPSLTARPGPTVRAGENVTLSCSSQSSFDIYHLSREGEAHELRLPAVPSINGTFQADFPLGPATHGETYRCFGSFHGSPYEWSDPSDPLPVSVTGNPSSSWPSPTEPSFKTGIARHLHAVIRYSVAIILFTILPFFLLHRWCSKKKNAAVMNQEPAGHRTVNREDSDEQDPQEVTYAQLDHCIFTQRKITGPSQRSKRPSTDTSVCIELPNAEPRALSPAHEHHSQALMGSSRETTALSQTQLASSNVPAAGI

SEQ ID NO: 9876 - protein, 519 aa, -Artificial-Sequence
MALPVTALLLPLALLLHAARPDIQMTQSPSSLSASVGDRVTITCKASDHINNWLAWYQQKPGQAPKLLIYGATTLETGVPSRFSGSGSGTDYTLTISSLQPEDFATYYCQQSWNTPWTFGQGTKLEIKRGGGGSGGGGSGGGGSQVQLQQPGAELVKPGASVKMSCKASGYAFSSYWINWMKQKPGQGLEWIGQIYPGDGDTNYNGKFKGRATLTADTSSSTAYMQLSSLTSEDSAVYFCARSITTVVGCAMDYWGQGTSVTVSSTRWAHVGGQDKPFCSAWPSAVVPQGGHVTLRCHYRRGFNIFTLYKKDGVPVPELYNRIFWNSFLISPVTPAHAGTYRCRGFHPHSPTEWSAPSNPLVIMVTGLYEKPSLTARPGPTVRAGENVTLSCSSQSSFDIYHLSREGEAHELRLPAVPSINGTFQADFPLGPATHGETYRCFGSFHGSPYEWSDPSDPLPVSVTGNPSSSWPSPTEPSFKTGIARHLHAVIRYSVAIILFTILPFFLLHRWCSKKKMLL

SEQ ID NO: 9877 - protein, 550 aa, -Artificial-Sequence
MALPVTALLLPLALLLHAARPDIQMTQSPSSLSASVGDRVTITCKASDHINNWLAWYQQKPGQAPKLLIYGATTLETGVPSRFSGSGSGTDYTLTISSLQPEDFATYYCQQSWNTPWTFGQGTKLEIKRGGGGSGGGGSGGGGSQVQLQQPGAELVKPGASVKMSCKASGYAFSSYWINWMKQKPGQGLEWIGQIYPGDGDTNYNGKFKGRATLTADTSSSTAYMQLSSLTSEDSAVYFCARSITTVVGCAMDYWGQGTSVTVSSTRHEGVHRKPSLLAHPGRLVKSEETVILQCWSDVMFEHFLLHREGMFNDTLRLIGEHHDGVSKANFSISRMKQDLAGTYRCYGSVTHSPYQLSAPSDPLDIVIIGLYEKPSLSAQPGPTVLAGENVTLSCSSRSSYDMYHLSREGEAHERRLPAGTKVNGTFQANFPLGPATHGGTYRCFGSFRDSPYEWSKSSDPLLVSVTGNPSNSWPSPTEPSSETGNPRHLHVLIGTSVVKIPFTILLFFLLHRWCSDKKNAAVMDQEPAGNRTVNSEDSDEQDHQEVSYA

SEQ ID NO: 9878 - protein, 550 aa, -Artificial-Sequence
MALPVTALLLPLALLLHAARPDIQMTQSPSSLSASVGDRVTITCKASDHINNWLAWYQQKPGQAPKLLIYGATTLETGVPSRFSGSGSGTDYTLTISSLQPEDFATYYCQQSWNTPWTFGQGTKLEIKRGGGGSGGGGSGGGGSQVQLQQPGAELVKPGASVKMSCKASGYAFSSYWINWMKQKPGQGLEWIGQIYPGDGDTNYNGKFKGRATLTADTSSSTAYMQLSSLTSEDSAVYFCARSITTVVGCAMDYWGQGTSVTVSSTRHEGVHRKPSLLAHPGPLVKSEETVILQCWSDVRFEHFLLHREGKYKDTLHLIGEHHDGVSKANFSIGPMMQDLAGTYRCYGSVTHSPYQLSAPSDPLDIVITGLYEKPSLSAQPGPTVLAGESVTLSCSSRSSYDMYHLSREGEAHERRFSAGPKVNGTFQADFPLGPATHGGTYRCFGSFRDSPYEWSNSSDPLLVSVTGNPSNSWPSPTEPSSKTGNPRHLHVLIGTSVVKIPFTILLFFLLHRWCSNKKNAAVMDQEPAGNRTVNSEDSDEQDHQEVSYA

SEQ ID NO: 9879 - protein, 550 aa, -Artificial-Sequence
MALPVTALLLPLALLLHAARPDIQMTQSPSSLSASVGDRVTITCKASDHINNWLAWYQQKPGQAPKLLIYGATTLETGVPSRFSGSGSGTDYTLTISSLQPEDFATYYCQQSWNTPWTFGQGTKLEIKRGGGGSGGGGSGGGGSQVQLQQPGAELVKPGASVKMSCKASGYAFSSYWINWMKQKPGQGLEWIGQIYPGDGDTNYNGKFKGRATLTADTSSSTAYMQLSSLTSEDSAVYFCARSITTVVGCAMDYWGQGTSVTVSSTRHEGFRRKPSLLAHPGRLVKSEETVILQCWSDVMFEHFLLHREGTFNDTLRLIGEHIDGVSKANFSIGRMRQDLAGTYRCYGSVPHSPYQFSAPSDPLDIVITGLYEKPSLSAQPGPTVLAGESVTLSCSSWSSYDMYHLSTEGEAHERRFSAGPKVNGTFQADFPLGPATQGGTYRCFGSFHDSPYEWSKSSDPLLVSVTGNPSNSWPSPTEPSSKTGNPRHLHVLIGTSVVKLPFTILLFFLLHRWCSDKKNASVMDQGPAGNRTVNREDSDEQDHQEVSYA

SEQ ID NO: 9880 - protein, 550 aa, -Artificial-Sequence
MALPVTALLLPLALLLHAARPDIQMTQSPSSLSASVGDRVTITCKASDHINNWLAWYQQKPGQAPKLLIYGATTLETGVPSRFSGSGSGTDYTLTISSLQPEDFATYYCQQSWNTPWTFGQGTKLEIKRGGGGSGGGGSGGGGSQVQLQQPGAELVKPGASVKMSCKASGYAFSSYWINWMKQKPGQGLEWIGQIYPGDGDTNYNGKFKGRATLTADTSSSTAYMQLSSLTSEDSAVYFCARSITTVVGCAMDYWGQGTSVTVSSTRQEGVHRKPSFLALPGHLVKSEETVILQCWSDVMFEHFLLHREGKFNNTLHLIGEHHDGVSKANFSIGPMMPVLAGTYRCYGSVPHSPYQLSAPSDPLDMVIIGLYEKPSLSAQPGPTVQAGENVTLSCSSRSSYDMYHLSREGEAHERRLPAVRSINGTFQADFPLGPATHGGTYRCFGSFRDAPYEWSNSSDPLLVSVTGNPSNSWPSPTEPSSKTGNPRHLHVLIGTSVVKIPFTILLFFLLHRWCSDKKNAAVMDQEPAGNRTVNSEDSDEQDHQEVSYA

SEQ ID NO: 9881 - protein, 550 aa, -Artificial-Sequence
MALPVTALLLPLALLLHAARPDIQMTQSPSSLSASVGDRVTITCKASDHINNWLAWYQQKPGQAPKLLIYGATTLETGVPSRFSGSGSGTDYTLTISSLQPEDFATYYCQQSWNTPWTFGQGTKLEIKRGGGGSGGGGSGGGGSQVQLQQPGAELVKPGASVKMSCKASGYAFSSYWINWMKQKPGQGLEWIGQIYPGDGDTNYNGKFKGRATLTADTSSSTAYMQLSSLTSEDSAVYFCARSITTVVGCAMDYWGQGTSVTVSSTRHEGFRRKPSLLAHPGPLVKSEETVILQCWSDVMFEHFLLHREGTFNHTLRLIGEHIDGVSKGNFSIGRMTQDLAGTYRCYGSVTHSPYQLSAPSDPLDIVITGLYEKPSLSAQPGPTVLAGESVTLSCSSRSSYDMYHLSREGEAHERRLPAGPKVNRTFQADFPLDPATHGGTYRCFGSFRDSPYEWSKSSDPLLVSVTGNSSNSWPSPTEPSSETGNPRHLHVLIGTSVVKLPFTILLFFLLHRWCSNKKNASVMDQGPAGNRTVNREDSDEQDHQEVSYA

SEQ ID NO: 9882 - protein, 631 aa, -Artificial-Sequence
MALPVTALLLPLALLLHAARPDIQMTQSPSSLSASVGDRVTITCKASDHINNWLAWYQQKPGQAPKLLIYGATTLETGVPSRFSGSGSGTDYTLTISSLQPEDFATYYCQQSWNTPWTFGQGTKLEIKRGGGGSGGGGSGGGGSQVQLQQPGAELVKPGASVKMSCKASGYAFSSYWINWMKQKPGQGLEWIGQIYPGDGDTNYNGKFKGRATLTADTSSSTAYMQLSSLTSEDSAVYFCARSITTVVGCAMDYWGQGTSVTVSSTRAGPHMGGQDKPFLSAWPSAVVPRGGHVTLRCHYRHRFNNFMLYKEDRIHVPIFHGRIFQEGFNMSPVTTAHAGNYTCRGSHPHSPTGWSAPSNPMVIMVTGNHRKPSLLAHPGPLVKSGERVILQCWSDIMFEHFFLHKEWISKDPSRLVGQIHDGVSKANFSIGSMMRALAGTYRCYGSVTHTPYQLSAPSDPLDIVVTGLYEKPSLSAQPGPKVQAGESVTLSCSSRSSYDMYHLSREGGAHERRLPAVRKVNRTFQADFPLGPATHGGTYRCFGSFRHSPYEWSDPSDPLLVSVTGNPSSSWPSPTEPSSKSGNLRHLHILIGTSVVKIPFTILLFFLLHRWCSNKKKCCCNGPRACREQK

SEQ ID NO: 9883 - protein, 643 aa, -Artificial-Sequence
MALPVTALLLPLALLLHAARPDIQMTQSPSSLSASVGDRVTITCKASDHINNWLAWYQQKPGQAPKLLIYGATTLETGVPSRFSGSGSGTDYTLTISSLQPEDFATYYCQQSWNTPWTFGQGTKLEIKRGGGGSGGGGSGGGGSQVQLQQPGAELVKPGASVKMSCKASGYAFSSYWINWMKQKPGQGLEWIGQIYPGDGDTNYNGKFKGRATLTADTSSSTAYMQLSSLTSEDSAVYFCARSITTVVGCAMDYWGQGTSVTVSSTRSLTNHTETITVEEGQTLTLKCVTSLRKNSSLQWLTPSGFTIFLNEYPALKNSKYQLLHHSANQLSITVPNVTLQDEGVYKCLHYSDSVSTKEVKVIVLATPFKPILEASVIRKQNGEEHVVLMCSTMRSKPPPQITWLLGNSMEVSGGTLHEFETDGKKCNTTSTLIIHTYGKNSTVDCIIRHRGLQGRKLVAPFRFEDLVTDEETASDALERNSLSSQDPQQPTSTVSVTEDSSTSEIDKEEKEQTTQDPDLTTEANPQYLGLARKKSGILLLTLVSFLIFILFIIVQLFIMKLRKAHVIWKKENEVSEHTLESYRSRSNNEETSSEEKNGQSSHPMRCMNYITKLYSEAKTKRKENVQHSKLEEKHIQVPESIV

SEQ ID NO: 9884 - protein, 490 aa, -Artificial-Sequence
MALPVTALLLPLALLLHAARPDIQMTQSPSSLSASVGDRVTITCKASDHINNWLAWYQQKPGQAPKLLIYGATTLETGVPSRFSGSGSGTDYTLTISSLQPEDFATYYCQQSWNTPWTFGQGTKLEIKRGGGGSGGGGSGGGGSQVQLQQPGAELVKPGASVKMSCKASGYAFSSYWINWMKQKPGQGLEWIGQIYPGDGDTNYNGKFKGRATLTADTSSSTAYMQLSSLTSEDSAVYFCARSITTVVGCAMDYWGQGTSVTVSSTRMMTGTIETTGNISAEKGGSIILQCHLSSTTAQVTQVNWEQQDQLLAICNADLGWHISPSFKDRVAPGPGLGLTLQSLTVNDTGEYFCIYHTYPDGTYTGRIFLEVLESSVAEHGARFQIPLLGAMAATLVVICTAVIVVVALTRKKKALRIHSVEGDLRRKSAGQEEWSPSAPSPPGSCVQAEAAPAGLCGEQRGEDCAELHDYFNVLSYRSLGNCSFFTETG

SEQ ID NO: 9885 - protein, 578 aa, -Artificial-Sequence
MALPVTALLLPLALLLHAARPDIQMTQSPSSLSASVGDRVTITCKASDHINNWLAWYQQKPGQAPKLLIYGATTLETGVPSRFSGSGSGTDYTLTISSLQPEDFATYYCQQSWNTPWTFGQGTKLEIKRGGGGSGGGGSGGGGSQVQLQQPGAELVKPGASVKMSCKASGYAFSSYWINWMKQKPGQGLEWIGQIYPGDGDTNYNGKFKGRATLTADTSSSTAYMQLSSLTSEDSAVYFCARSITTVVGCAMDYWGQGTSVTVSSTRQSSLTPLMVNGILGESVTLPLEFPAGEKVNFITWLFNETSLAFIVPHETKSPEIHVTNPKQGKRLNFTQSYSLQLSNLKMEDTGSYRAQISTKTSAKLSSYTLRILRQLRNIQVTNHSQLFQNMTCELHLTCSVEDADDNVSFRWEALGNTLSSQPNLTVSWDPRISSEQDYTCIAENAVSNLSFSVSAQKLCEDVKIQYTDTKMILFMVSGICIVFGFIILLLLVLRKRRDSLSLSTQRTQGPAESARNLEYVSVSPTNNTVYASVTHSNRETEIWTPRENDTITIYSTINHSKESKPTFSRATALDNVV

SEQ ID NO: 9886 - protein, 580 aa, -Artificial-Sequence
MALPVTALLLPLALLLHAARPDIQMTQSPSSLSASVGDRVTITCKASDHINNWLAWYQQKPGQAPKLLIYGATTLETGVPSRFSGSGSGTDYTLTISSLQPEDFATYYCQQSWNTPWTFGQGTKLEIKRGGGGSGGGGSGGGGSQVQLQQPGAELVKPGASVKMSCKASGYAFSSYWINWMKQKPGQGLEWIGQIYPGDGDTNYNGKFKGRATLTADTSSSTAYMQLSSLTSEDSAVYFCARSITTVVGCAMDYWGQGTSVTVSSTRSGPVKELVGSVGGAVTFPLKSKVKQVDSIVWTFNTTPLVTIQPEGGTIIVTQNRNRERVDFPDGGYSLKLSKLKKNDSGIYYVGIYSSSLQQPSTQEYVLHVYEHLSKPKVTMGLQSNKNGTCVTNLTCCMEHGEEDVIYTWKALGQAANESHNGSILPISWRWGESDMTFICVARNPVSRNFSSPILARKLCEGAADDPDSSMVLLCLLLVPLLLSLFVLGLFLWFLKRERQEEYIEEKKRVDICRETPNICPHSGENTEYDTIPHTNRTILKEDPANTVYSTVEIPKKMENPHSLLTMPDTPRLFAYENVI

SEQ ID NO: 9887 - protein, 508 aa, -Artificial-Sequence
MALPVTALLLPLALLLHAARPDIQMTQSPSSLSASVGDRVTITCKASDHINNWLAWYQQKPGQAPKLLIYGATTLETGVPSRFSGSGSGTDYTLTISSLQPEDFATYYCQQSWNTPWTFGQGTKLEIKRGGGGSGGGGSGGGGSQVQLQQPGAELVKPGASVKMSCKASGYAFSSYWINWMKQKPGQGLEWIGQIYPGDGDTNYNGKFKGRATLTADTSSSTAYMQLSSLTSEDSAVYFCARSITTVVGCAMDYWGQGTSVTVSSTRATPAPKSCPERHYWAQGKLCCQMCEPGTFLVKDCDQHRKAAQCDPCIPGVSFSPDHHTRPHCESCRHCNSGLLVRNCTITANAECACRNGWQCRDKECTECDPLPNPSLTARSSQALSPHPQPTHLPYVSEMLEARTAGHMQTLADFRQLPARTLSTHWPPQRSLCSSDFIRILVIFSGMFLVFTLAGALFLHQRRKYRSNKGESPVEPAEPCHYSCPREEEGSTIPIQEDYRKPEPACSP

SEQ ID NO: 9888 - protein, 896 aa, -Artificial-Sequence
MALPVTALLLPLALLLHAARPDIQMTQSPSSLSASVGDRVTITCKASDHINNWLAWYQQKPGQAPKLLIYGATTLETGVPSRFSGSGSGTDYTLTISSLQPEDFATYYCQQSWNTPWTFGQGTKLEIKRGGGGSGGGGSGGGGSQVQLQQPGAELVKPGASVKMSCKASGYAFSSYWINWMKQKPGQGLEWIGQIYPGDGDTNYNGKFKGRATLTADTSSSTAYMQLSSLTSEDSAVYFCARSITTVVGCAMDYWGQGTSVTVSSTRGHLPKPTLWAEPGSVITQGSPVTLRCQGGQETQEYRLYREKKTAPWITRIPQELVKKGQFPIPSITWEHTGRYRCYYGSDTAGRSESSDPLELVVTGAYIKPTLSAQPSPVVNSGGNVTLQCDSQVAFDGFILCKEGEDEHPQCLNSQPHARGSSRAIFSVGPVSPSRRWWYRCYAYDSNSPYEWSLPSDLLELLVLGVSKKPSLSVQPGPIVAPEETLTLQCGSDAGYNRFVLYKDGERDFLQLAGAQPQAGLSQANFTLGPVSRSYGGQYRCYGAHNLSSEWSAPSDPLDILIAGQFYDRVSLSVQPGPTVASGENVTLLCQSQGWMQTFLLTKEGAADDPWRLRSTYQSQKYQAEFPMGPVTSAHAGTYRCYGSQSSKPYLLTHPSDPLELVVSGPSGGPSSPTTGPTSTSAGPEDQPLTPTGSDPQSGLGRHLGVVIGILVAVILLLLLLLLLFLILRHRRQGKHWTSTQRKADFQHPAGAVGPEPTDRGLQWRSSPAADAQEENLYAAVKHTQPEDGVEMDTRQSPHDEDPQAVTYAEVKHSRPRREMASPPSPLSGEFLDTKDRQAEEDRQMDTEAAASEAPQDVTYAQLHSLTLRREATEPPPSQEGPSPAVPSIYATLAIH

SEQ ID NO: 9889 - protein, 533 aa, -Artificial-Sequence
MALPVTALLLPLALLLHAARPDIQMTQSPSSLSASVGDRVTITCKASDHINNWLAWYQQKPGQAPKLLIYGATTLETGVPSRFSGSGSGTDYTLTISSLQPEDFATYYCQQSWNTPWTFGQGTKLEIKRGGGGSGGGGSGGGGSQVQLQQPGAELVKPGASVKMSCKASGYAFSSYWINWMKQKPGQGLEWIGQIYPGDGDTNYNGKFKGRATLTADTSSSTAYMQLSSLTSEDSAVYFCARSITTVVGCAMDYWGQGTSVTVSSTRQEEDLPRPSISAEPGTVIPLGSHVTFVCRGPVGVQTFRLERDSRSTYNDTEDVSQASPSESEARFRIDSVREGNAGLYRCIYYKPPKWSEQSDYLELLVKESSGGPDSPDTEPGSSAGPTQRPSDNSHNEHAPASQGLKAEHLYILIGVSVVFLFCLLLLVLFCLHRQNQIKQGPPRSKDEEQKPQQRPDLAVDVLERTADKATVNGLPEKDRETDTSALAAGSSQEVTYAQLDHWALTQRTARAVSPQSTKPMAESITYAAVARH

SEQ ID NO: 9890 - protein, 499 aa, -Artificial-Sequence; identical to SEQ ID NO: 6328

SEQ ID NO: 9891 - protein, 469 aa, -Artificial-Sequence; identical to SEQ ID NO: 6392

SEQ ID NO: 9892 - protein, 516 aa, -Artificial-Sequence; identical to SEQ ID NO: 6456

SEQ ID NO: 9893 - protein, 613 aa, -Artificial-Sequence; identical to SEQ ID NO: 6520

SEQ ID NO: 9894 - protein, 535 aa, -Artificial-Sequence; identical to SEQ ID NO: 6584

SEQ ID NO: 9895 - protein, 627 aa, -Artificial-Sequence; identical to SEQ ID NO: 6648

SEQ ID NO: 9896 - protein, 359 aa, -Artificial-Sequence
MALPVTALLLPLALLLHAARPDIQMTQSPSSLSASVGDRVTITCKASDHINNWLAWYQQKPGQAPKLLIYGATTLETGVPSRFSGSGSGTDYTLTISSLQPEDFATYYCQQSWNTPWTFGQGTKLEIKRGGGGSGGGGSGGGGSQVQLQQPGAELVKPGASVKMSCKASGYAFSSYWINWMKQKPGQGLEWIGQIYPGDGDTNYNGKFKGRATLTADTSSSTAYMQLSSLTSEDSAVYFCARSITTVVGCAMDYWGQGTSVTVSSTRKIEVMYPPPYLDNEKSNGTIIHVKGARITQGLAVSTISSFFPPGYQVSFCLVMVLLFAVDTGLYFSVKTNIRSSTRDWKDHKFKWRKDPQDK

SEQ ID NO: 9897 - protein, 359 aa, -Artificial-Sequence
MALPVTALLLPLALLLHAARPDIQMTQSPSSLSASVGDRVTITCKASDHINNWLAWYQQKPGQAPKLLIYGATTLETGVPSRFSGSGSGTDYTLTISSLQPEDFATYYCQQSWNTPWTFGQGTKLEIKRGGGGSGGGGSGGGGSQVQLQQPGAELVKPGASVKMSCKASGYAFSSYWINWMKQKPGQGLEWIGQIYPGDGDTNYNGKFKGRATLTADTSSSTAYMQLSSLTSEDSAVYFCARSITTVVGCAMDYWGQGTSVTVSSTRKIEVMYPPPYLDNEKSNGTIIHVKGARITQGLAVPTISSFFPPGYQVSFCLVMVLLFAVDTGLYFSVKTNIRSSTRDWKDHKFKWRKDPQDK

SEQ ID NO: 9898 - protein, 338 aa, -Artificial-Sequence
MALPVTALLLPLALLLHAARPDIQMTQSPSSLSASVGDRVTITCKASDHINNWLAWYQQKPGQAPKLLIYGATTLETGVPSRFSGSGSGTDYTLTISSLQPEDFATYYCQQSWNTPWTFGQGTKLEIKRGGGGSGGGGSGGGGSQVQLQQPGAELVKPGASVKMSCKASGYAFSSYWINWMKQKPGQGLEWIGQIYPGDGDTNYNGKFKGRATLTADTSSSTAYMQLSSLTSEDSAVYFCARSITTVVGCAMDYWGQGTSVTVSSTRKIEVMYPPPYLDNEKSNGTIIHVKGARITQGLAVSTISSFSPPGYQVSFCLVMVLLFAVDTGLYFSVKTNI

SEQ ID NO: 9899 - protein, 369 aa, -Artificial-Sequence
MALPVTALLLPLALLLHAARPDIQMTQSPSSLSASVGDRVTITCKASDHINNWLAWYQQKPGQAPKLLIYGATTLETGVPSRFSGSGSGTDYTLTISSLQPEDFATYYCQQSWNTPWTFGQGTKLEIKRGGGGSGGGGSGGGGSQVQLQQPGAELVKPGASVKMSCKASGYAFSSYWINWMKQKPGQGLEWIGQIYPGDGDTNYNGKFKGRATLTADTSSSTAYMQLSSLTSEDSAVYFCARSITTVVGCAMDYWGQGTSVTVSSTRKIEVMYPPPYLDNEKSNGTIIHVKGARVEKEHPQLGAGTVLLLRAGFYAVSFLSVAVGSTVYYQGKCLTWKGPRRQLPAVVPAPLPPPCGSSAHLLPPVPGG

SEQ ID NO: 9900 - protein, 450 aa, -Artificial-Sequence
MALPVTALLLPLALLLHAARPDIQMTQSPSSLSASVGDRVTITCKASDHINNWLAWYQQKPGQAPKLLIYGATTLETGVPSRFSGSGSGTDYTLTISSLQPEDFATYYCQQSWNTPWTFGQGTKLEIKRGGGGSGGGGSGGGGSQVQLQQPGAELVKPGASVKMSCKASGYAFSSYWINWMKQKPGQGLEWIGQIYPGDGDTNYNGKFKGRATLTADTSSSTAYMQLSSLTSEDSAVYFCARSITTVVGCAMDYWGQGTSVTVSSTRKIEVMYPPPYLDNEKSNGTIIHVKGARKSVRFYLVVSPASASTQTSWTPRDLVSSQTQTQSCVPPTAGARQAPESPSTIPVPSQPQNSTLRPGPAAPIALVPVFCGLLVAKSLVLSALLVWWGDIWWKTMMELRSLDTQKATCHLQQVTDLPWTSVSSPVEREILYHTVARTKISDDDDEHTL

SEQ ID NO: 9901 - protein, 387 aa, -Artificial-Sequence
MALPVTALLLPLALLLHAARPDIQMTQSPSSLSASVGDRVTITCKASDHINNWLAWYQQKPGQAPKLLIYGATTLETGVPSRFSGSGSGTDYTLTISSLQPEDFATYYCQQSWNTPWTFGQGTKLEIKRGGGGSGGGGSGGGGSQVQLQQPGAELVKPGASVKMSCKASGYAFSSYWINWMKQKPGQGLEWIGQIYPGDGDTNYNGKFKGRATLTADTSSSTAYMQLSSLTSEDSAVYFCARSITTVVGCAMDYWGQGTSVTVSSTRKIEVMYPPPYLDNEKSNGTIIHVKGARGDIENTSLAPEDPTFPADTWGTYLLTTETGLQKDHALWDHTAQNLLRMGLAFLVLVALVWFLVEDWLSRKRTRERASRASTWEGRRRLNTQTL

SEQ ID NO: 9902 - protein, 421 aa, -Artificial-Sequence
MALPVTALLLPLALLLHAARPDIQMTQSPSSLSASVGDRVTITCKASDHINNWLAWYQQKPGQAPKLLIYGATTLETGVPSRFSGSGSGTDYTLTISSLQPEDFATYYCQQSWNTPWTFGQGTKLEIKRGGGGSGGGGSGGGGSQVQLQQPGAELVKPGASVKMSCKASGYAFSSYWINWMKQKPGQGLEWIGQIYPGDGDTNYNGKFKGRATLTADTSSSTAYMQLSSLTSEDSAVYFCARSITTVVGCAMDYWGQGTSVTVSSTRKIEVMYPPPYLDNEKSNGTIIHVKGARGNPSNSWPSPTEPSSKTGNPRHLHILIGTSVVIILFILLFFLLHRWCSNKKNAAVMDQESAGNRTANSEDSDEQDPQEVTYTQLNHCVFTQRKITRPSQRPKTPPTDIIVYTELPNAESRSKVVSCP

SEQ ID NO: 9903 - protein, 437 aa, -Artificial-Sequence
MALPVTALLLPLALLLHAARPDIQMTQSPSSLSASVGDRVTITCKASDHINNWLAWYQQKPGQAPKLLIYGATTLETGVPSRFSGSGSGTDYTLTISSLQPEDFATYYCQQSWNTPWTFGQGTKLEIKRGGGGSGGGGSGGGGSQVQLQQPGAELVKPGASVKMSCKASGYAFSSYWINWMKQKPGQGLEWIGQIYPGDGDTNYNGKFKGRATLTADTSSSTAYMQLSSLTSEDSAVYFCARSITTVVGCAMDYWGQGTSVTVSSTRKIEVMYPPPYLDNEKSNGTIIHVKGARPYEWSNSSDPLLVSVTGNPSNSWPSPTEPSSKTGNPRHLHILIGTSVVIILFILLFFLLHRWCSNKKNAAVMDQESAGNRTANSEDSDEQDPQEVTYTQLNHCVFTQRKITRPSQRPKTPPTDIIVYTELPNAESRSKVVSCP

SEQ ID NO: 9904 - protein, 414 aa, -Artificial-Sequence
MALPVTALLLPLALLLHAARPDIQMTQSPSSLSASVGDRVTITCKASDHINNWLAWYQQKPGQAPKLLIYGATTLETGVPSRFSGSGSGTDYTLTISSLQPEDFATYYCQQSWNTPWTFGQGTKLEIKRGGGGSGGGGSGGGGSQVQLQQPGAELVKPGASVKMSCKASGYAFSSYWINWMKQKPGQGLEWIGQIYPGDGDTNYNGKFKGRATLTADTSSSTAYMQLSSLTSEDSAVYFCARSITTVVGCAMDYWGQGTSVTVSSTRKIEVMYPPPYLDNEKSNGTIIHVKGARGNPSNSWPSPTEPSSETGNPRHLHVLIGTSVVIILFILLLFFLLHRWCCNKKNAVVMDQEPAGNRTVNREDSDEQDPQEVTYAQLNHCVFTQRKITRPSQRPKTPPTDIIVYTELPNAEP

SEQ ID NO: 9905 - protein, 469 aa, -Artificial-Sequence
MALPVTALLLPLALLLHAARPDIQMTQSPSSLSASVGDRVTITCKASDHINNWLAWYQQKPGQAPKLLIYGATTLETGVPSRFSGSGSGTDYTLTISSLQPEDFATYYCQQSWNTPWTFGQGTKLEIKRGGGGSGGGGSGGGGSQVQLQQPGAELVKPGASVKMSCKASGYAFSSYWINWMKQKPGQGLEWIGQIYPGDGDTNYNGKFKGRATLTADTSSSTAYMQLSSLTSEDSAVYFCARSITTVVGCAMDYWGQGTSVTVSSTRKIEVMYPPPYLDNEKSNGTIIHVKGARPYEWSDPSDPLLVSVTGNSSSSSSSPTEPSSKTGIRRHLHILIGTSVAIILFIILFFFLLHCCCSNKKNAAVMDQEPAGDRTVNREDSDDQDPQEVTYAQLDHCVFTQTKITSPSQRPKTPPTDTTMYMELPNAKPRSLSPAHKHHSQALRGSSRETTALSQNRVASSHVPAAGI

SEQ ID NO: 9906 - protein, 469 aa, -Artificial-Sequence
MALPVTALLLPLALLLHAARPDIQMTQSPSSLSASVGDRVTITCKASDHINNWLAWYQQKPGQAPKLLIYGATTLETGVPSRFSGSGSGTDYTLTISSLQPEDFATYYCQQSWNTPWTFGQGTKLEIKRGGGGSGGGGSGGGGSQVQLQQPGAELVKPGASVKMSCKASGYAFSSYWINWMKQKPGQGLEWIGQIYPGDGDTNYNGKFKGRATLTADTSSSTAYMQLSSLTSEDSAVYFCARSITTVVGCAMDYWGQGTSVTVSSTRKIEVMYPPPYLDNEKSNGTIIHVKGARPYEWSDPSDPLLVSVTGNSSSSSSSPTEPSSKTGIRRHLHILIGTSVAIILFIILFFFLLHCCCSNKKNAAVMDQGPAGDRTVNREDSDDQDPQEVTYAQLDHCVFTQTKITSPSQRPKAPPTDTTMYMELPNAKPRSLSPAHKHHSQALRGSSRETTALSQNRVASSHVPAAGI

SEQ ID NO: 9907 - protein, 422 aa, -Artificial-Sequence
MALPVTALLLPLALLLHAARPDIQMTQSPSSLSASVGDRVTITCKASDHINNWLAWYQQKPGQAPKLLIYGATTLETGVPSRFSGSGSGTDYTLTISSLQPEDFATYYCQQSWNTPWTFGQGTKLEIKRGGGGSGGGGSGGGGSQVQLQQPGAELVKPGASVKMSCKASGYAFSSYWINWMKQKPGQGLEWIGQIYPGDGDTNYNGKFKGRATLTADTSSSTAYMQLSSLTSEDSAVYFCARSITTVVGCAMDYWGQGTSVTVSSTRKIEVMYPPPYLDNEKSNGTIIHVKGARGNPSSSWPSPTEPSSKSGNPRHLHILIGTSVVIILFILLLFFLLHLWCSNKKNAAVMDQEPAGNRTANSEDSDEQDPEEVTYAQLDHCVFTQRKITRPSQRPKTPPTDTILYTELPNAKPRSKVVSCP

SEQ ID NO: 9908 - protein, 432 aa, -Artificial-Sequence
MALPVTALLLPLALLLHAARPDIQMTQSPSSLSASVGDRVTITCKASDHINNWLAWYQQKPGQAPKLLIYGATTLETGVPSRFSGSGSGTDYTLTISSLQPEDFATYYCQQSWNTPWTFGQGTKLEIKRGGGGSGGGGSGGGGSQVQLQQPGAELVKPGASVKMSCKASGYAFSSYWINWMKQKPGQGLEWIGQIYPGDGDTNYNGKFKGRATLTADTSSSTAYMQLSSLTSEDSAVYFCARSITTVVGCAMDYWGQGTSVTVSSTRKIEVMYPPPYLDNEKSNGTIIHVKGARPCVWSNSSDPLLVSVTGICRHLHVLIGTSVVIFLFILLLFFLLYRWCSNKKNAAVMDQEPAGDRTVNRQDSDEQDPQEVTYAQLDHCVFIQRKISRPSQRPKTPLTDTSVYTELPNAEPRSKVVSCPRAPQSGLEGVF

SEQ ID NO: 9909 - protein, 449 aa, -Artificial-Sequence
MALPVTALLLPLALLLHAARPDIQMTQSPSSLSASVGDRVTITCKASDHINNWLAWYQQKPGQAPKLLIYGATTLETGVPSRFSGSGSGTDYTLTISSLQPEDFATYYCQQSWNTPWTFGQGTKLEIKRGGGGSGGGGSGGGGSQVQLQQPGAELVKPGASVKMSCKASGYAFSSYWINWMKQKPGQGLEWIGQIYPGDGDTNYNGKFKGRATLTADTSSSTAYMQLSSLTSEDSAVYFCARSITTVVGCAMDYWGQGTSVTVSSTRKIEVMYPPPYLDNEKSNGTIIHVKGARPCVWSNSSDPLLVSVTGNPSSSWPSPTEPSSKSGICRHLHVLIGTSVVIFLFILLLFFLLYRWCSNKKNAAVMDQEPAGDRTVNRQDSDEQDPQEVTYAQLDHCVFIQRKISRPSQRPKTPLTDTSVYTELPNAEPRSKVVSCPRAPQSGLEGVF

SEQ ID NO: 9910 - protein, 409 aa, -Artificial-Sequence
MALPVTALLLPLALLLHAARPDIQMTQSPSSLSASVGDRVTITCKASDHINNWLAWYQQKPGQAPKLLIYGATTLETGVPSRFSGSGSGTDYTLTISSLQPEDFATYYCQQSWNTPWTFGQGTKLEIKRGGGGSGGGGSGGGGSQVQLQQPGAELVKPGASVKMSCKASGYAFSSYWINWMKQKPGQGLEWIGQIYPGDGDTNYNGKFKGRATLTADTSSSTAYMQLSSLTSEDSAVYFCARSITTVVGCAMDYWGQGTSVTVSSTRKIEVMYPPPYLDNEKSNGTIIHVKGARSFRALPHAWSDPSDPLPVSVTGNSRNLHVLIGTSVVIIPFAILLFFLLHRWCANKKNAVVMDQEPAGNRTVNREDSDEQDPQEVTYAQLNHCVFTQRKITRPSQRPKTPPTDTSV

SEQ ID NO: 9911 - protein, 469 aa, -Artificial-Sequence
MALPVTALLLPLALLLHAARPDIQMTQSPSSLSASVGDRVTITCKASDHINNWLAWYQQKPGQAPKLLIYGATTLETGVPSRFSGSGSGTDYTLTISSLQPEDFATYYCQQSWNTPWTFGQGTKLEIKRGGGGSGGGGSGGGGSQVQLQQPGAELVKPGASVKMSCKASGYAFSSYWINWMKQKPGQGLEWIGQIYPGDGDTNYNGKFKGRATLTADTSSSTAYMQLSSLTSEDSAVYFCARSITTVVGCAMDYWGQGTSVTVSSTRKIEVMYPPPYLDNEKSNGTIIHVKGARPYEWSDPSDPLPVSVTGNPSSSWPSPTEPSFKTGIARHLHAVIRYSVAIILFTILPFFLLHRWCSKKKNAAVMNQEPAGHRTVNREDSDEQDPQEVTYAQLDHCIFTQRKITGPSQRSKRPSTDTSVCIELPNAEPRALSPAHEHHSQALMGSSRETTALSQTQLASSNVPAAGI

SEQ ID NO: 9912 - protein, 365 aa, -Artificial-Sequence
MALPVTALLLPLALLLHAARPDIQMTQSPSSLSASVGDRVTITCKASDHINNWLAWYQQKPGQAPKLLIYGATTLETGVPSRFSGSGSGTDYTLTISSLQPEDFATYYCQQSWNTPWTFGQGTKLEIKRGGGGSGGGGSGGGGSQVQLQQPGAELVKPGASVKMSCKASGYAFSSYWINWMKQKPGQGLEWIGQIYPGDGDTNYNGKFKGRATLTADTSSSTAYMQLSSLTSEDSAVYFCARSITTVVGCAMDYWGQGTSVTVSSTRKIEVMYPPPYLDNEKSNGTIIHVKGARPYEWSDPSDPLPVSVTGNPSSSWPSPTEPSFKTGIARHLHAVIRYSVAIILFTILPFFLLHRWCSKKKMLL

SEQ ID NO: 9913 - protein, 377 aa, -Artificial-Sequence
MALPVTALLLPLALLLHAARPDIQMTQSPSSLSASVGDRVTITCKASDHINNWLAWYQQKPGQAPKLLIYGATTLETGVPSRFSGSGSGTDYTLTISSLQPEDFATYYCQQSWNTPWTFGQGTKLEIKRGGGGSGGGGSGGGGSQVQLQQPGAELVKPGASVKMSCKASGYAFSSYWINWMKQKPGQGLEWIGQIYPGDGDTNYNGKFKGRATLTADTSSSTAYMQLSSLTSEDSAVYFCARSITTVVGCAMDYWGQGTSVTVSSTRKIEVMYPPPYLDNEKSNGTIIHVKGARGNPSNSWPSPTEPSSETGNPRHLHVLIGTSVVKIPFTILLFFLLHRWCSDKKNAAVMDQEPAGNRTVNSEDSDEQDHQEVSYA

SEQ ID NO: 9914 - protein, 393 aa, -Artificial-Sequence
MALPVTALLLPLALLLHAARPDIQMTQSPSSLSASVGDRVTITCKASDHINNWLAWYQQKPGQAPKLLIYGATTLETGVPSRFSGSGSGTDYTLTISSLQPEDFATYYCQQSWNTPWTFGQGTKLEIKRGGGGSGGGGSGGGGSQVQLQQPGAELVKPGASVKMSCKASGYAFSSYWINWMKQKPGQGLEWIGQIYPGDGDTNYNGKFKGRATLTADTSSSTAYMQLSSLTSEDSAVYFCARSITTVVGCAMDYWGQGTSVTVSSTRKIEVMYPPPYLDNEKSNGTIIHVKGARPYEWSNSSDPLLVSVTGNPSNSWPSPTEPSSKTGNPRHLHVLIGTSVVKIPFTILLFFLLHRWCSNKKNAAVMDQEPAGNRTVNSEDSDEQDHQEVSYA

SEQ ID NO: 9915 - protein, 393 aa, -Artificial-Sequence
MALPVTALLLPLALLLHAARPDIQMTQSPSSLSASVGDRVTITCKASDHINNWLAWYQQKPGQAPKLLIYGATTLETGVPSRFSGSGSGTDYTLTISSLQPEDFATYYCQQSWNTPWTFGQGTKLEIKRGGGGSGGGGSGGGGSQVQLQQPGAELVKPGASVKMSCKASGYAFSSYWINWMKQKPGQGLEWIGQIYPGDGDTNYNGKFKGRATLTADTSSSTAYMQLSSLTSEDSAVYFCARSITTVVGCAMDYWGQGTSVTVSSTRKIEVMYPPPYLDNEKSNGTIIHVKGARPYEWSKSSDPLLVSVTGNPSNSWPSPTEPSSKTGNPRHLHVLIGTSVVKLPFTILLFFLLHRWCSDKKNASVMDQGPAGNRTVNREDSDEQDHQEVSYA

SEQ ID NO: 9916 - protein, 377 aa, -Artificial-Sequence
MALPVTALLLPLALLLHAARPDIQMTQSPSSLSASVGDRVTITCKASDHINNWLAWYQQKPGQAPKLLIYGATTLETGVPSRFSGSGSGTDYTLTISSLQPEDFATYYCQQSWNTPWTFGQGTKLEIKRGGGGSGGGGSGGGGSQVQLQQPGAELVKPGASVKMSCKASGYAFSSYWINWMKQKPGQGLEWIGQIYPGDGDTNYNGKFKGRATLTADTSSSTAYMQLSSLTSEDSAVYFCARSITTVVGCAMDYWGQGTSVTVSSTRKIEVMYPPPYLDNEKSNGTIIHVKGARGNPSNSWPSPTEPSSKTGNPRHLHVLIGTSVVKIPFTILLFFLLHRWCSDKKNAAVMDQEPAGNRTVNSEDSDEQDHQEVSYA

SEQ ID NO: 9917 - protein, 393 aa, -Artificial-Sequence
MALPVTALLLPLALLLHAARPDIQMTQSPSSLSASVGDRVTITCKASDHINNWLAWYQQKPGQAPKLLIYGATTLETGVPSRFSGSGSGTDYTLTISSLQPEDFATYYCQQSWNTPWTFGQGTKLEIKRGGGGSGGGGSGGGGSQVQLQQPGAELVKPGASVKMSCKASGYAFSSYWINWMKQKPGQGLEWIGQIYPGDGDTNYNGKFKGRATLTADTSSSTAYMQLSSLTSEDSAVYFCARSITTVVGCAMDYWGQGTSVTVSSTRKIEVMYPPPYLDNEKSNGTIIHVKGARPYEWSKSSDPLLVSVTGNSSNSWPSPTEPSSETGNPRHLHVLIGTSVVKLPFTILLFFLLHRWCSNKKNASVMDQGPAGNRTVNREDSDEQDHQEVSYA

SEQ ID NO: 9918 - protein, 360 aa, -Artificial-Sequence
MALPVTALLLPLALLLHAARPDIQMTQSPSSLSASVGDRVTITCKASDHINNWLAWYQQKPGQAPKLLIYGATTLETGVPSRFSGSGSGTDYTLTISSLQPEDFATYYCQQSWNTPWTFGQGTKLEIKRGGGGSGGGGSGGGGSQVQLQQPGAELVKPGASVKMSCKASGYAFSSYWINWMKQKPGQGLEWIGQIYPGDGDTNYNGKFKGRATLTADTSSSTAYMQLSSLTSEDSAVYFCARSITTVVGCAMDYWGQGTSVTVSSTRKIEVMYPPPYLDNEKSNGTIIHVKGARGNPSSSWPSPTEPSSKSGNLRHLHILIGTSVVKIPFTILLFFLLHRWCSNKKKCCCNGPRACREQK

SEQ ID NO: 9919 - protein, 477 aa, -Artificial-Sequence
MALPVTALLLPLALLLHAARPDIQMTQSPSSLSASVGDRVTITCKASDHINNWLAWYQQKPGQAPKLLIYGATTLETGVPSRFSGSGSGTDYTLTISSLQPEDFATYYCQQSWNTPWTFGQGTKLEIKRGGGGSGGGGSGGGGSQVQLQQPGAELVKPGASVKMSCKASGYAFSSYWINWMKQKPGQGLEWIGQIYPGDGDTNYNGKFKGRATLTADTSSSTAYMQLSSLTSEDSAVYFCARSITTVVGCAMDYWGQGTSVTVSSTRKIEVMYPPPYLDNEKSNGTIIHVKGARPFRFEDLVTDEETASDALERNSLSSQDPQQPTSTVSVTEDSSTSEIDKEEKEQTTQDPDLTTEANPQYLGLARKKSGILLLTLVSFLIFILFIIVQLFIMKLRKAHVIWKKENEVSEHTLESYRSRSNNEETSSEEKNGQSSHPMRCMNYITKLYSEAKTKRKENVQHSKLEEKHIQVPESIV

SEQ ID NO: 9920 - protein, 415 aa, -Artificial-Sequence
MALPVTALLLPLALLLHAARPDIQMTQSPSSLSASVGDRVTITCKASDHINNWLAWYQQKPGQAPKLLIYGATTLETGVPSRFSGSGSGTDYTLTISSLQPEDFATYYCQQSWNTPWTFGQGTKLEIKRGGGGSGGGGSGGGGSQVQLQQPGAELVKPGASVKMSCKASGYAFSSYWINWMKQKPGQGLEWIGQIYPGDGDTNYNGKFKGRATLTADTSSSTAYMQLSSLTSEDSAVYFCARSITTVVGCAMDYWGQGTSVTVSSTRKIEVMYPPPYLDNEKSNGTIIHVKGARLEVLESSVAEHGARFQIPLLGAMAATLVVICTAVIVVVALTRKKKALRIHSVEGDLRRKSAGQEEWSPSAPSPPGSCVQAEAAPAGLCGEQRGEDCAELHDYFNVLSYRSLGNCSFFTETG

SEQ ID NO: 9921 - protein, 417 aa, -Artificial-Sequence
MALPVTALLLPLALLLHAARPDIQMTQSPSSLSASVGDRVTITCKASDHINNWLAWYQQKPGQAPKLLIYGATTLETGVPSRFSGSGSGTDYTLTISSLQPEDFATYYCQQSWNTPWTFGQGTKLEIKRGGGGSGGGGSGGGGSQVQLQQPGAELVKPGASVKMSCKASGYAFSSYWINWMKQKPGQGLEWIGQIYPGDGDTNYNGKFKGRATLTADTSSSTAYMQLSSLTSEDSAVYFCARSITTVVGCAMDYWGQGTSVTVSSTRKIEVMYPPPYLDNEKSNGTIIHVKGARAQKLCEDVKIQYTDTKMILFMVSGICIVFGFIILLLLVLRKRRDSLSLSTQRTQGPAESARNLEYVSVSPTNNTVYASVTHSNRETEIWTPRENDTITIYSTINHSKESKPTFSRATALDNVV

SEQ ID NO: 9922 - protein, 423 aa, -Artificial-Sequence
MALPVTALLLPLALLLHAARPDIQMTQSPSSLSASVGDRVTITCKASDHINNWLAWYQQKPGQAPKLLIYGATTLETGVPSRFSGSGSGTDYTLTISSLQPEDFATYYCQQSWNTPWTFGQGTKLEIKRGGGGSGGGGSGGGGSQVQLQQPGAELVKPGASVKMSCKASGYAFSSYWINWMKQKPGQGLEWIGQIYPGDGDTNYNGKFKGRATLTADTSSSTAYMQLSSLTSEDSAVYFCARSITTVVGCAMDYWGQGTSVTVSSTRKIEVMYPPPYLDNEKSNGTIIHVKGARSPILARKLCEGAADDPDSSMVLLCLLLVPLLLSLFVLGLFLWFLKRERQEEYIEEKKRVDICRETPNICPHSGENTEYDTIPHTNRTILKEDPANTVYSTVEIPKKMENPHSLLTMPDTPRLFAYENVI

SEQ ID NO: 9923 - protein, 376 aa, -Artificial-Sequence
MALPVTALLLPLALLLHAARPDIQMTQSPSSLSASVGDRVTITCKASDHINNWLAWYQQKPGQAPKLLIYGATTLETGVPSRFSGSGSGTDYTLTISSLQPEDFATYYCQQSWNTPWTFGQGTKLEIKRGGGGSGGGGSGGGGSQVQLQQPGAELVKPGASVKMSCKASGYAFSSYWINWMKQKPGQGLEWIGQIYPGDGDTNYNGKFKGRATLTADTSSSTAYMQLSSLTSEDSAVYFCARSITTVVGCAMDYWGQGTSVTVSSTRKIEVMYPPPYLDNEKSNGTIIHVKGARPPQRSLCSSDFIRILVIFSGMFLVFTLAGALFLHQRRKYRSNKGESPVEPAEPCHYSCPREEEGSTIPIQEDYRKPEPACSP

SEQ ID NO: 9924 - protein, 464 aa, -Artificial-Sequence
MALPVTALLLPLALLLHAARPDIQMTQSPSSLSASVGDRVTITCKASDHINNWLAWYQQKPGQAPKLLIYGATTLETGVPSRFSGSGSGTDYTLTISSLQPEDFATYYCQQSWNTPWTFGQGTKLEIKRGGGGSGGGGSGGGGSQVQLQQPGAELVKPGASVKMSCKASGYAFSSYWINWMKQKPGQGLEWIGQIYPGDGDTNYNGKFKGRATLTADTSSSTAYMQLSSLTSEDSAVYFCARSITTVVGCAMDYWGQGTSVTVSSTRKIEVMYPPPYLDNEKSNGTIIHVKGARLLVKESSGGPDSPDTEPGSSAGPTQRPSDNSHNEHAPASQGLKAEHLYILIGVSVVFLFCLLLLVLFCLHRQNQIKQGPPRSKDEEQKPQQRPDLAVDVLERTADKATVNGLPEKDRETDTSALAAGSSQEVTYAQLDHWALTQRTARAVSPQSTKPMAESITYAAVARH

SEQ ID NO: 9925 - protein, 537 aa, -Artificial-Sequence
MALPVTALLLPLALLLHAARPDIQMTQSPSSLSASVGDRVTITCKASDHINNWLAWYQQKPGQAPKLLIYGATTLETGVPSRFSGSGSGTDYTLTISSLQPEDFATYYCQQSWNTPWTFGQGTKLEIKRGGGGSGGGGSGGGGSQVQLQQPGAELVKPGASVKMSCKASGYAFSSYWINWMKQKPGQGLEWIGQIYPGDGDTNYNGKFKGRATLTADTSSSTAYMQLSSLTSEDSAVYFCARSITTVVGCAMDYWGQGTSVTVSSTRKIEVMYPPPYLDNEKSNGTIIHVKGARHPSDPLELVVSGPSGGPSSPTTGPTSTSAGPEDQPLTPTGSDPQSGLGRHLGVVIGILVAVILLLLLLLLLFLILRHRRQGKHWTSTQRKADFQHPAGAVGPEPTDRGLQWRSSPAADAQEENLYAAVKHTQPEDGVEMDTRQSPHDEDPQAVTYAEVKHSRPRREMASPPSPLSGEFLDTKDRQAEEDRQMDTEAAASEAPQDVTYAQLHSLTLRREATEPPPSQEGPSPAVPSIYATLAIH

SEQ ID NO: 9926 - protein, 391 aa, -Artificial-Sequence
MALPVTALLLPLALLLHAARPDIQMTQSPSSLSASVGDRVTITCKASDHINNWLAWYQQKPGQAPKLLIYGATTLETGVPSRFSGSGSGTDYTLTISSLQPEDFATYYCQQSWNTPWTFGQGTKLEIKRGGGGSGGGGSGGGGSQVQLQQPGAELVKPGASVKMSCKASGYAFSSYWINWMKQKPGQGLEWIGQIYPGDGDTNYNGKFKGRATLTADTSSSTAYMQLSSLTSEDSAVYFCARSITTVVGCAMDYWGQGTSVTVSSTRKIEVMYPPPYLDNEKSNGTIIHVKGARGPSPADLSPGASSVTPPAPAREPGHSPQIISFFLALTSTALLFLLFFLTLRFSVVKRGRKKLLYIFKQPFMRPVQTTQEEDGCSCRFPEEEEGGCEL

SEQ ID NO: 9927 - protein, 402 aa, -Artificial-Sequence
MALPVTALLLPLALLLHAARPDIQMTQSPSSLSASVGDRVTITCKASDHINNWLAWYQQKPGQAPKLLIYGATTLETGVPSRFSGSGSGTDYTLTISSLQPEDFATYYCQQSWNTPWTFGQGTKLEIKRGGGGSGGGGSGGGGSQVQLQQPGAELVKPGASVKMSCKASGYAFSSYWINWMKQKPGQGLEWIGQIYPGDGDTNYNGKFKGRATLTADTSSSTAYMQLSSLTSEDSAVYFCARSITTVVGCAMDYWGQGTSVTVSSTRKIEVMYPPPYLDNEKSNGTIIHVKGARKIEVMYPPPYLDNEKSNGTIIHVKGKHLCPSPLFPGPSKPFWVLVVVGGVLACYSLLVTVAFIIFWVRSKRSRLLHSDYMNMTPRRPGPTRKHYQPYAPPRDFAAYRS

SEQ ID NO: 9928 - protein, 405 aa, -Artificial-Sequence
MALPVTALLLPLALLLHAARPDIQMTQSPSSLSASVGDRVTITCKASDHINNWLAWYQQKPGQAPKLLIYGATTLETGVPSRFSGSGSGTDYTLTISSLQPEDFATYYCQQSWNTPWTFGQGTKLEIKRGGGGSGGGGSGGGGSQVQLQQPGAELVKPGASVKMSCKASGYAFSSYWINWMKQKPGQGLEWIGQIYPGDGDTNYNGKFKGRATLTADTSSSTAYMQLSSLTSEDSAVYFCARSITTVVGCAMDYWGQGTSVTVSSTRKIEVMYPPPYLDNEKSNGTIIHVKGAREDRDPPATQPQETQGPPARPITVQPTEAWPRTSQGPSTRPVEVPGGRAVAAILGLGLVLGLLGPLAILLALYLLRRDQRLPPDAHKPPGGGSFRTPIQEEQADAHSTLAKI

SEQ ID NO: 9929 - protein, 449 aa, -Artificial-Sequence
MALPVTALLLPLALLLHAARPDIQMTQSPSSLSASVGDRVTITCKASDHINNWLAWYQQKPGQAPKLLIYGATTLETGVPSRFSGSGSGTDYTLTISSLQPEDFATYYCQQSWNTPWTFGQGTKLEIKRGGGGSGGGGSGGGGSQVQLQQPGAELVKPGASVKMSCKASGYAFSSYWINWMKQKPGQGLEWIGQIYPGDGDTNYNGKFKGRATLTADTSSSTAYMQLSSLTSEDSAVYFCARSITTVVGCAMDYWGQGTSVTVSSTRKIEVMYPPPYLDNEKSNGTIIHVKGARQDCQNAHQEFRFWPFLVIIVILSALFLGTLACFCVWRRKRKEKQSETSPKEFLTIYEDVKDLKTRRNHEQEQTFPGGGSTIYSMIQSQSSAPTSQEPAYTLYSLIQPSRKSGSRKRNHSPSFNSTIYEVIGKSQPKAQNPARLSRKELENFDVYS

SEQ ID NO: 9930 - protein, 391 aa, -Artificial-Sequence
MALPVTALLLPLALLLHAARPDIQMTQSPSSLSASVGDRVTITCKASDHINNWLAWYQQKPGQAPKLLIYGATTLETGVPSRFSGSGSGTDYTLTISSLQPEDFATYYCQQSWNTPWTFGQGTKLEIKRGGGGSGGGGSGGGGSQVQLQQPGAELVKPGASVKMSCKASGYAFSSYWINWMKQKPGQGLEWIGQIYPGDGDTNYNGKFKGRATLTADTSSSTAYMQLSSLTSEDSAVYFCARSITTVVGCAMDYWGQGTSVTVSSTRKIEVMYPPPYLDNEKSNGTIIHVKGARVQAPSSSPMGIIVAVVTGIAVAAIVAAVVALIYCRKKRISALPGYPECREMGETLPEKPANPTNPDEADKVGAENTITYSLLMHPDALEEPDDQNRI

SEQ ID NO: 9931 - protein, 391 aa, -Artificial-Sequence
MALPVTALLLPLALLLHAARPDIQMTQSPSSLSASVGDRVTITCKASDHINNWLAWYQQKPGQAPKLLIYGATTLETGVPSRFSGSGSGTDYTLTISSLQPEDFATYYCQQSWNTPWTFGQGTKLEIKRGGGGSGGGGSGGGGSQVQLQQPGAELVKPGASVKMSCKASGYAFSSYWINWMKQKPGQGLEWIGQIYPGDGDTNYNGKFKGRATLTADTSSSTAYMQLSSLTSEDSAVYFCARSITTVVGCAMDYWGQGTSVTVSSTRKIEVMYPPPYLDNEKSNGTIIHVKGARLQVLGLQLPTPVWFHVLFYLAVGIMFLVNTVLWVTIRKELKRKKKWDLEISLDSGHEKKVISSLQEDRHLEEELKCQEQKEEQLQEGVHRKEPQGAT

SEQ ID NO: 9932 - protein, 437 aa, -Artificial-Sequence
MALPVTALLLPLALLLHAARPDIQMTQSPSSLSASVGDRVTITCKASDHINNWLAWYQQKPGQAPKLLIYGATTLETGVPSRFSGSGSGTDYTLTISSLQPEDFATYYCQQSWNTPWTFGQGTKLEIKRGGGGSGGGGSGGGGSQVQLQQPGAELVKPGASVKMSCKASGYAFSSYWINWMKQKPGQGLEWIGQIYPGDGDTNYNGKFKGRATLTADTSSSTAYMQLSSLTSEDSAVYFCARSITTVVGCAMDYWGQGTSVTVSSTRKIEVMYPPPYLDNEKSNGTIIHVKGARQSFGLLDPKLCYLLDGILFIYGVILTALFLRVKFSRSADAPAYQQGQNQLYNELNLGRREEYDVLDKRRGRDPEMGGKPQRRKNPQEGLYNELQKDKMAEAYSEIGMKGERRRGKGHDGLYQGLSTATKDTYDALHMQALPPR

SEQ ID NO: 9933 - protein, 479 aa, -Artificial-Sequence
MALPVTALLLPLALLLHAARPDIQMTQSPSSLSASVGDRVTITCKASDHINNWLAWYQQKPGQAPKLLIYGATTLETGVPSRFSGSGSGTDYTLTISSLQPEDFATYYCQQSWNTPWTFGQGTKLEIKRGGGGSGGGGSGGGGSQVQLQQPGAELVKPGASVKMSCKASGYAFSSYWINWMKQKPGQGLEWIGQIYPGDGDTNYNGKFKGRATLTADTSSSTAYMQLSSLTSEDSAVYFCARSITTVVGCAMDYWGQGTSVTVSSTRKIEVMYPPPYLDNEKSNGTIIHVKGARQSFGLLDPKLCYLLDGILFIYGVILTALFLKRGRKKLLYIFKQPFMRPVQTTQEEDGCSCRFPEEEEGGCELRVKFSRSADAPAYQQGQNQLYNELNLGRREEYDVLDKRRGRDPEMGGKPQRRKNPQEGLYNELQKDKMAEAYSEIGMKGERRRGKGHDGLYQGLSTATKDTYDALHMQALPPR

SEQ ID NO: 9934 - protein, 478 aa, -Artificial-Sequence
MALPVTALLLPLALLLHAARPDIQMTQSPSSLSASVGDRVTITCKASDHINNWLAWYQQKPGQAPKLLIYGATTLETGVPSRFSGSGSGTDYTLTISSLQPEDFATYYCQQSWNTPWTFGQGTKLEIKRGGGGSGGGGSGGGGSQVQLQQPGAELVKPGASVKMSCKASGYAFSSYWINWMKQKPGQGLEWIGQIYPGDGDTNYNGKFKGRATLTADTSSSTAYMQLSSLTSEDSAVYFCARSITTVVGCAMDYWGQGTSVTVSSTRKIEVMYPPPYLDNEKSNGTIIHVKGARQSFGLLDPKLCYLLDGILFIYGVILTALFLRSKRSRLLHSDYMNMTPRRPGPTRKHYQPYAPPRDFAAYRSRVKFSRSADAPAYQQGQNQLYNELNLGRREEYDVLDKRRGRDPEMGGKPQRRKNPQEGLYNELQKDKMAEAYSEIGMKGERRRGKGHDGLYQGLSTATKDTYDALHMQALPPR

SEQ ID NO: 9935 - protein, 473 aa, -Artificial-Sequence
MALPVTALLLPLALLLHAARPDIQMTQSPSSLSASVGDRVTITCKASDHINNWLAWYQQKPGQAPKLLIYGATTLETGVPSRFSGSGSGTDYTLTISSLQPEDFATYYCQQSWNTPWTFGQGTKLEIKRGGGGSGGGGSGGGGSQVQLQQPGAELVKPGASVKMSCKASGYAFSSYWINWMKQKPGQGLEWIGQIYPGDGDTNYNGKFKGRATLTADTSSSTAYMQLSSLTSEDSAVYFCARSITTVVGCAMDYWGQGTSVTVSSTRKIEVMYPPPYLDNEKSNGTIIHVKGARQSFGLLDPKLCYLLDGILFIYGVILTALFLRDQRLPPDAHKPPGGGSFRTPIQEEQADAHSTLAKIRVKFSRSADAPAYQQGQNQLYNELNLGRREEYDVLDKRRGRDPEMGGKPQRRKNPQEGLYNELQKDKMAEAYSEIGMKGERRRGKGHDGLYQGLSTATKDTYDALHMQALPPR

SEQ ID NO: 9936 - protein, 557 aa, -Artificial-Sequence
MALPVTALLLPLALLLHAARPDIQMTQSPSSLSASVGDRVTITCKASDHINNWLAWYQQKPGQAPKLLIYGATTLETGVPSRFSGSGSGTDYTLTISSLQPEDFATYYCQQSWNTPWTFGQGTKLEIKRGGGGSGGGGSGGGGSQVQLQQPGAELVKPGASVKMSCKASGYAFSSYWINWMKQKPGQGLEWIGQIYPGDGDTNYNGKFKGRATLTADTSSSTAYMQLSSLTSEDSAVYFCARSITTVVGCAMDYWGQGTSVTVSSTRKIEVMYPPPYLDNEKSNGTIIHVKGARQSFGLLDPKLCYLLDGILFIYGVILTALFLWRRKRKEKQSETSPKEFLTIYEDVKDLKTRRNHEQEQTFPGGGSTIYSMIQSQSSAPTSQEPAYTLYSLIQPSRKSGSRKRNHSPSFNSTIYEVIGKSQPKAQNPARLSRKELENFDVYSRVKFSRSADAPAYQQGQNQLYNELNLGRREEYDVLDKRRGRDPEMGGKPQRRKNPQEGLYNELQKDKMAEAYSEIGMKGERRRGKGHDGLYQGLSTATKDTYDALHMQALPPR

SEQ ID NO: 9937 - protein, 437 aa, -Artificial-Sequence
MALPVTALLLPLALLLHAARPDIQMTQSPSSLSASVGDRVTITCKASDHINNWLAWYQQKPGQAPKLLIYGATTLETGVPSRFSGSGSGTDYTLTISSLQPEDFATYYCQQSWNTPWTFGQGTKLEIKRGGGGSGGGGSGGGGSQVQLQQPGAELVKPGASVKMSCKASGYAFSSYWINWMKQKPGQGLEWIGQIYPGDGDTNYNGKFKGRATLTADTSSSTAYMQLSSLTSEDSAVYFCARSITTVVGCAMDYWGQGTSVTVSSTRKIEVMYPPPYLDNEKSNGTIIHVKGARQSFGLLDPKLSYLLDGILFIYGVILTALFLRVKFSRSADAPAYQQGQNQLYNELNLGRREEYDVLDKRRGRDPEMGGKPQRRKNPQEGLYNELQKDKMAEAYSEIGMKGERRRGKGHDGLYQGLSTATKDTYDALHMQALPPR

SEQ ID NO: 9938 - protein, 437 aa, -Artificial-Sequence
MALPVTALLLPLALLLHAARPDIQMTQSPSSLSASVGDRVTITCKASDHINNWLAWYQQKPGQAPKLLIYGATTLETGVPSRFSGSGSGTDYTLTISSLQPEDFATYYCQQSWNTPWTFGQGTKLEIKRGGGGSGGGGSGGGGSQVQLQQPGAELVKPGASVKMSCKASGYAFSSYWINWMKQKPGQGLEWIGQIYPGDGDTNYNGKFKGRATLTADTSSSTAYMQLSSLTSEDSAVYFCARSITTVVGCAMDYWGQGTSVTVSSTRKIEVMYPPPYLDNEKSNGTIIHVKGARQSFGLLDPKLCYLLDGILFIYGVILTALFLRVKFSRSADAPAYQQGQNQLYNELNLGRREEYDVLDKRRGRDPEMGGKPQRRKNPQEGLFNELQKDKMAEAFSEIGMKGERRRGKGHDGLFQGLSTATKDTFDALHMQALPPR

SEQ ID NO: 9939 - protein, 368 aa, -Artificial-Sequence
MALPVTALLLPLALLLHAARPDIQMTQSPSSLSASVGDRVTITCKASDHINNWLAWYQQKPGQAPKLLIYGATTLETGVPSRFSGSGSGTDYTLTISSLQPEDFATYYCQQSWNTPWTFGQGTKLEIKRGGGGSGGGGSGGGGSQVQLQQPGAELVKPGASVKMSCKASGYAFSSYWINWMKQKPGQGLEWIGQIYPGDGDTNYNGKFKGRATLTADTSSSTAYMQLSSLTSEDSAVYFCARSITTVVGCAMDYWGQGTSVTVSSTRKIEVMYPPPYLDNEKSNGTIIHVKGARTTPGERSSLPAFYPGTSGSCSGCGSLSLPLLAGLVAADAVASLLIVGAVFLCARPRRSPAQEDGKVYINMPGRG

SEQ ID NO: 9940 - protein, 410 aa, -Artificial-Sequence
MALPVTALLLPLALLLHAARPDIQMTQSPSSLSASVGDRVTITCKASDHINNWLAWYQQKPGQAPKLLIYGATTLETGVPSRFSGSGSGTDYTLTISSLQPEDFATYYCQQSWNTPWTFGQGTKLEIKRGGGGSGGGGSGGGGSQVQLQQPGAELVKPGASVKMSCKASGYAFSSYWINWMKQKPGQGLEWIGQIYPGDGDTNYNGKFKGRATLTADTSSSTAYMQLSSLTSEDSAVYFCARSITTVVGCAMDYWGQGTSVTVSSTRKIEVMYPPPYLDNEKSNGTIIHVKGARTTPGERSSLPAFYPGTSGSCSGCGSLSLPLLAGLVAADAVASLLIVGAVFKRGRKKLLYIFKQPFMRPVQTTQEEDGCSCRFPEEEEGGCELLCARPRRSPAQEDGKVYINMPGRG

SEQ ID NO: 9941 - protein, 409 aa, -Artificial-Sequence
MALPVTALLLPLALLLHAARPDIQMTQSPSSLSASVGDRVTITCKASDHINNWLAWYQQKPGQAPKLLIYGATTLETGVPSRFSGSGSGTDYTLTISSLQPEDFATYYCQQSWNTPWTFGQGTKLEIKRGGGGSGGGGSGGGGSQVQLQQPGAELVKPGASVKMSCKASGYAFSSYWINWMKQKPGQGLEWIGQIYPGDGDTNYNGKFKGRATLTADTSSSTAYMQLSSLTSEDSAVYFCARSITTVVGCAMDYWGQGTSVTVSSTRKIEVMYPPPYLDNEKSNGTIIHVKGARTTPGERSSLPAFYPGTSGSCSGCGSLSLPLLAGLVAADAVASLLIVGAVFRSKRSRLLHSDYMNMTPRRPGPTRKHYQPYAPPRDFAAYRSLCARPRRSPAQEDGKVYINMPGRG

SEQ ID NO: 9942 - protein, 404 aa, -Artificial-Sequence
MALPVTALLLPLALLLHAARPDIQMTQSPSSLSASVGDRVTITCKASDHINNWLAWYQQKPGQAPKLLIYGATTLETGVPSRFSGSGSGTDYTLTISSLQPEDFATYYCQQSWNTPWTFGQGTKLEIKRGGGGSGGGGSGGGGSQVQLQQPGAELVKPGASVKMSCKASGYAFSSYWINWMKQKPGQGLEWIGQIYPGDGDTNYNGKFKGRATLTADTSSSTAYMQLSSLTSEDSAVYFCARSITTVVGCAMDYWGQGTSVTVSSTRKIEVMYPPPYLDNEKSNGTIIHVKGARTTPGERSSLPAFYPGTSGSCSGCGSLSLPLLAGLVAADAVASLLIVGAVFRDQRLPPDAHKPPGGGSFRTPIQEEQADAHSTLAKILCARPRRSPAQEDGKVYINMPGRG

SEQ ID NO: 9943 - protein, 488 aa, -Artificial-Sequence
MALPVTALLLPLALLLHAARPDIQMTQSPSSLSASVGDRVTITCKASDHINNWLAWYQQKPGQAPKLLIYGATTLETGVPSRFSGSGSGTDYTLTISSLQPEDFATYYCQQSWNTPWTFGQGTKLEIKRGGGGSGGGGSGGGGSQVQLQQPGAELVKPGASVKMSCKASGYAFSSYWINWMKQKPGQGLEWIGQIYPGDGDTNYNGKFKGRATLTADTSSSTAYMQLSSLTSEDSAVYFCARSITTVVGCAMDYWGQGTSVTVSSTRKIEVMYPPPYLDNEKSNGTIIHVKGARTTPGERSSLPAFYPGTSGSCSGCGSLSLPLLAGLVAADAVASLLIVGAVFWRRKRKEKQSETSPKEFLTIYEDVKDLKTRRNHEQEQTFPGGGSTIYSMIQSQSSAPTSQEPAYTLYSLIQPSRKSGSRKRNHSPSFNSTIYEVIGKSQPKAQNPARLSRKELENFDVYSLCARPRRSPAQEDGKVYINMPGRG

SEQ ID NO: 9944 - protein, 404 aa, -Artificial-Sequence
MALPVTALLLPLALLLHAARPDIQMTQSPSSLSASVGDRVTITCKASDHINNWLAWYQQKPGQAPKLLIYGATTLETGVPSRFSGSGSGTDYTLTISSLQPEDFATYYCQQSWNTPWTFGQGTKLEIKRGGGGSGGGGSGGGGSQVQLQQPGAELVKPGASVKMSCKASGYAFSSYWINWMKQKPGQGLEWIGQIYPGDGDTNYNGKFKGRATLTADTSSSTAYMQLSSLTSEDSAVYFCARSITTVVGCAMDYWGQGTSVTVSSTRKIEVMYPPPYLDNEKSNGTIIHVKGARLGEPQLCYILDAILFLYGIVLTLLYCKRGRKKLLYIFKQPFMRPVQTTQEEDGCSCRFPEEEEGGCELRLKIQVRKAAITSYEKSDGVYTGLSTRNQETYETLKHEKPPQ

SEQ ID NO: 9945 - protein, 403 aa, -Artificial-Sequence
MALPVTALLLPLALLLHAARPDIQMTQSPSSLSASVGDRVTITCKASDHINNWLAWYQQKPGQAPKLLIYGATTLETGVPSRFSGSGSGTDYTLTISSLQPEDFATYYCQQSWNTPWTFGQGTKLEIKRGGGGSGGGGSGGGGSQVQLQQPGAELVKPGASVKMSCKASGYAFSSYWINWMKQKPGQGLEWIGQIYPGDGDTNYNGKFKGRATLTADTSSSTAYMQLSSLTSEDSAVYFCARSITTVVGCAMDYWGQGTSVTVSSTRKIEVMYPPPYLDNEKSNGTIIHVKGARLGEPQLCYILDAILFLYGIVLTLLYCRSKRSRLLHSDYMNMTPRRPGPTRKHYQPYAPPRDFAAYRSRLKIQVRKAAITSYEKSDGVYTGLSTRNQETYETLKHEKPPQ

SEQ ID NO: 9946 - protein, 398 aa, -Artificial-Sequence
MALPVTALLLPLALLLHAARPDIQMTQSPSSLSASVGDRVTITCKASDHINNWLAWYQQKPGQAPKLLIYGATTLETGVPSRFSGSGSGTDYTLTISSLQPEDFATYYCQQSWNTPWTFGQGTKLEIKRGGGGSGGGGSGGGGSQVQLQQPGAELVKPGASVKMSCKASGYAFSSYWINWMKQKPGQGLEWIGQIYPGDGDTNYNGKFKGRATLTADTSSSTAYMQLSSLTSEDSAVYFCARSITTVVGCAMDYWGQGTSVTVSSTRKIEVMYPPPYLDNEKSNGTIIHVKGARLGEPQLCYILDAILFLYGIVLTLLYCRDQRLPPDAHKPPGGGSFRTPIQEEQADAHSTLAKIRLKIQVRKAAITSYEKSDGVYTGLSTRNQETYETLKHEKPPQ

SEQ ID NO: 9947 - protein, 482 aa, -Artificial-Sequence
MALPVTALLLPLALLLHAARPDIQMTQSPSSLSASVGDRVTITCKASDHINNWLAWYQQKPGQAPKLLIYGATTLETGVPSRFSGSGSGTDYTLTISSLQPEDFATYYCQQSWNTPWTFGQGTKLEIKRGGGGSGGGGSGGGGSQVQLQQPGAELVKPGASVKMSCKASGYAFSSYWINWMKQKPGQGLEWIGQIYPGDGDTNYNGKFKGRATLTADTSSSTAYMQLSSLTSEDSAVYFCARSITTVVGCAMDYWGQGTSVTVSSTRKIEVMYPPPYLDNEKSNGTIIHVKGARLGEPQLCYILDAILFLYGIVLTLLYCWRRKRKEKQSETSPKEFLTIYEDVKDLKTRRNHEQEQTFPGGGSTIYSMIQSQSSAPTSQEPAYTLYSLIQPSRKSGSRKRNHSPSFNSTIYEVIGKSQPKAQNPARLSRKELENFDVYSRLKIQVRKAAITSYEKSDGVYTGLSTRNQETYETLKHEKPPQ

SEQ ID NO: 9948 - protein, 362 aa, -Artificial-Sequence
MALPVTALLLPLALLLHAARPDIQMTQSPSSLSASVGDRVTITCKASDHINNWLAWYQQKPGQAPKLLIYGATTLETGVPSRFSGSGSGTDYTLTISSLQPEDFATYYCQQSWNTPWTFGQGTKLEIKRGGGGSGGGGSGGGGSQVQLQQPGAELVKPGASVKMSCKASGYAFSSYWINWMKQKPGQGLEWIGQIYPGDGDTNYNGKFKGRATLTADTSSSTAYMQLSSLTSEDSAVYFCARSITTVVGCAMDYWGQGTSVTVSSTRKIEVMYPPPYLDNEKSNGTIIHVKGARLGEPQLSYILDAILFLYGIVLTLLYCRLKIQVRKAAITSYEKSDGVYTGLSTRNQETYETLKHEKPPQ

SEQ ID NO: 9949 - protein, 380 aa, -Artificial-Sequence
MALPVTALLLPLALLLHAARPDIQMTQSPSSLSASVGDRVTITCKASDHINNWLAWYQQKPGQAPKLLIYGATTLETGVPSRFSGSGSGTDYTLTISSLQPEDFATYYCQQSWNTPWTFGQGTKLEIKRGGGGSGGGGSGGGGSQVQLQQPGAELVKPGASVKMSCKASGYAFSSYWINWMKQKPGQGLEWIGQIYPGDGDTNYNGKFKGRATLTADTSSSTAYMQLSSLTSEDSAVYFCARSITTVVGCAMDYWGQGTSVTVSSTRKIEVMYPPPYLDNEKSNGTIIHVKGARQAQSDCSCSTVSPGVLAGIVMGDLVLTVLIALAVYFLGRLVPRGRGAAEAATRKQRITETESPYQELQGQRSDVYSDLNTQRPYYK

SEQ ID NO: 9950 - protein, 380 aa, -Artificial-Sequence
MALPVTALLLPLALLLHAARPDIQMTQSPSSLSASVGDRVTITCKASDHINNWLAWYQQKPGQAPKLLIYGATTLETGVPSRFSGSGSGTDYTLTISSLQPEDFATYYCQQSWNTPWTFGQGTKLEIKRGGGGSGGGGSGGGGSQVQLQQPGAELVKPGASVKMSCKASGYAFSSYWINWMKQKPGQGLEWIGQIYPGDGDTNYNGKFKGRATLTADTSSSTAYMQLSSLTSEDSAVYFCARSITTVVGCAMDYWGQGTSVTVSSTRKIEVMYPPPYLDNEKSNGTIIHVKGARQAQSDCSSSTVSPGVLAGIVMGDLVLTVLIALAVYFLGRLVPRGRGAAEAATRKQRITETESPYQELQGQRSDVYSDLNTQRPYYK

SEQ ID NO: 9951 - protein, 422 aa, -Artificial-Sequence
MALPVTALLLPLALLLHAARPDIQMTQSPSSLSASVGDRVTITCKASDHINNWLAWYQQKPGQAPKLLIYGATTLETGVPSRFSGSGSGTDYTLTISSLQPEDFATYYCQQSWNTPWTFGQGTKLEIKRGGGGSGGGGSGGGGSQVQLQQPGAELVKPGASVKMSCKASGYAFSSYWINWMKQKPGQGLEWIGQIYPGDGDTNYNGKFKGRATLTADTSSSTAYMQLSSLTSEDSAVYFCARSITTVVGCAMDYWGQGTSVTVSSTRKIEVMYPPPYLDNEKSNGTIIHVKGARQAQSDCSCSTVSPGVLAGIVMGDLVLTVLIALAVYFLGRLVPRGRGAAEAATRKQRITETESPYQELQGQRSDVYSDLNTQKRGRKKLLYIFKQPFMRPVQTTQEEDGCSCRFPEEEEGGCELRPYYK

SEQ ID NO: 9952 - protein, 421 aa, -Artificial-Sequence
MALPVTALLLPLALLLHAARPDIQMTQSPSSLSASVGDRVTITCKASDHINNWLAWYQQKPGQAPKLLIYGATTLETGVPSRFSGSGSGTDYTLTISSLQPEDFATYYCQQSWNTPWTFGQGTKLEIKRGGGGSGGGGSGGGGSQVQLQQPGAELVKPGASVKMSCKASGYAFSSYWINWMKQKPGQGLEWIGQIYPGDGDTNYNGKFKGRATLTADTSSSTAYMQLSSLTSEDSAVYFCARSITTVVGCAMDYWGQGTSVTVSSTRKIEVMYPPPYLDNEKSNGTIIHVKGARQAQSDCSCSTVSPGVLAGIVMGDLVLTVLIALAVYFLGRLVPRGRGAAEAATRKQRITETESPYQELQGQRSDVYSDLNTQRSKRSRLLHSDYMNMTPRRPGPTRKHYQPYAPPRDFAAYRSRPYYK

SEQ ID NO: 9953 - protein, 416 aa, -Artificial-Sequence
MALPVTALLLPLALLLHAARPDIQMTQSPSSLSASVGDRVTITCKASDHINNWLAWYQQKPGQAPKLLIYGATTLETGVPSRFSGSGSGTDYTLTISSLQPEDFATYYCQQSWNTPWTFGQGTKLEIKRGGGGSGGGGSGGGGSQVQLQQPGAELVKPGASVKMSCKASGYAFSSYWINWMKQKPGQGLEWIGQIYPGDGDTNYNGKFKGRATLTADTSSSTAYMQLSSLTSEDSAVYFCARSITTVVGCAMDYWGQGTSVTVSSTRKIEVMYPPPYLDNEKSNGTIIHVKGARQAQSDCSCSTVSPGVLAGIVMGDLVLTVLIALAVYFLGRLVPRGRGAAEAATRKQRITETESPYQELQGQRSDVYSDLNTQRDQRLPPDAHKPPGGGSFRTPIQEEQADAHSTLAKIRPYYK

SEQ ID NO: 9954 - protein, 500 aa, -Artificial-Sequence
MALPVTALLLPLALLLHAARPDIQMTQSPSSLSASVGDRVTITCKASDHINNWLAWYQQKPGQAPKLLIYGATTLETGVPSRFSGSGSGTDYTLTISSLQPEDFATYYCQQSWNTPWTFGQGTKLEIKRGGGGSGGGGSGGGGSQVQLQQPGAELVKPGASVKMSCKASGYAFSSYWINWMKQKPGQGLEWIGQIYPGDGDTNYNGKFKGRATLTADTSSSTAYMQLSSLTSEDSAVYFCARSITTVVGCAMDYWGQGTSVTVSSTRKIEVMYPPPYLDNEKSNGTIIHVKGARQAQSDCSCSTVSPGVLAGIVMGDLVLTVLIALAVYFLGRLVPRGRGAAEAATRKQRITETESPYQELQGQRSDVYSDLNTQWRRKRKEKQSETSPKEFLTIYEDVKDLKTRRNHEQEQTFPGGGSTIYSMIQSQSSAPTSQEPAYTLYSLIQPSRKSGSRKRNHSPSFNSTIYEVIGKSQPKAQNPARLSRKELENFDVYSRPYYK

SEQ ID NO: 9955 - protein, 484 aa, -Artificial-Sequence
MALPVTALLLPLALLLHAARPDIQMTQSPSSLSASVGDRVTITCKASDHINNWLAWYQQKPGQAPKLLIYGATTLETGVPSRFSGSGSGTDYTLTISSLQPEDFATYYCQQSWNTPWTFGQGTKLEIKRGGGGSGGGGSGGGGSQVQLQQPGAELVKPGASVKMSCKASGYAFSSYWINWMKQKPGQGLEWIGQIYPGDGDTNYNGKFKGRATLTADTSSSTAYMQLSSLTSEDSAVYFCARSITTVVGCAMDYWGQGTSVTVSSTRKIEVMYPPPYLDNEKSNGTIIHVKGARTTPGERSSLPAFYPGTSGSCSGCGSLSLPLLAGLVAADAVASLLIVGAVFLCARPRRSPAQEDGKVYINMPGRGSSRRVKFSRSADAPAYQQGQNQLYNELNLGRREEYDVLDKRRGRDPEMGGKPQRRKNPQEGLYNELQKDKMAEAYSEIGMKGERRRGKGHDGLYQGLSTATKDTYDALHMQALPPR

SEQ ID NO: 9956 - protein, 488 aa, -Artificial-Sequence
MALPVTALLLPLALLLHAARPDIQMTQSPSSLSASVGDRVTITCKASDHINNWLAWYQQKPGQAPKLLIYGATTLETGVPSRFSGSGSGTDYTLTISSLQPEDFATYYCQQSWNTPWTFGQGTKLEIKRGGGGSGGGGSGGGGSQVQLQQPGAELVKPGASVKMSCKASGYAFSSYWINWMKQKPGQGLEWIGQIYPGDGDTNYNGKFKGRATLTADTSSSTAYMQLSSLTSEDSAVYFCARSITTVVGCAMDYWGQGTSVTVSSTRKIEVMYPPPYLDNEKSNGTIIHVKGARQAQSDCSCSTVSPGVLAGIVMGDLVLTVLIALAVYFLGRLVPRGRGAAEAATRKQRITETESPYQELQGQRSDVYSDLNTQRVKFSRSADAPAYQQGQNQLYNELNLGRREEYDVLDKRRGRDPEMGGKPQRRKNPQEGLYNELQKDKMAEAYSEIGMKGERRRGKGHDGLYQGLSTATKDTYDALHMQALPPR

SEQ ID NO: 9957 - protein, 342 aa, -Artificial-Sequence
MALPVTALLLPLALLLHAARPDIQMTQSPSSLSASVGDRVTITCKASDHINNWLAWYQQKPGQAPKLLIYGATTLETGVPSRFSGSGSGTDYTLTISSLQPEDFATYYCQQSWNTPWTFGQGTKLEIKRGGGGSGGGGSGGGGSQVQLQQPGAELVKPGASVKMSCKASGYAFSSYWINWMKQKPGQGLEWIGQIYPGDGDTNYNGKFKGRATLTADTSSSTAYMQLSSLTSEDSAVYFCARSITTVVGCAMDYWGQGTSVTVSSTRKIEVMYPPPYLDNEKSNGTIIHVKGARYQVSFCLVMVLLFAVDTGLYFSVKTNIRSSTRDWKDHKFKWRKDPQDK

SEQ ID NO: 9958 - protein, 342 aa, -Artificial-Sequence; identical to SEQ ID NO: 9957

SEQ ID NO: 9959 - protein, 321 aa, -Artificial-Sequence
MALPVTALLLPLALLLHAARPDIQMTQSPSSLSASVGDRVTITCKASDHINNWLAWYQQKPGQAPKLLIYGATTLETGVPSRFSGSGSGTDYTLTISSLQPEDFATYYCQQSWNTPWTFGQGTKLEIKRGGGGSGGGGSGGGGSQVQLQQPGAELVKPGASVKMSCKASGYAFSSYWINWMKQKPGQGLEWIGQIYPGDGDTNYNGKFKGRATLTADTSSSTAYMQLSSLTSEDSAVYFCARSITTVVGCAMDYWGQGTSVTVSSTRKIEVMYPPPYLDNEKSNGTIIHVKGARYQVSFCLVMVLLFAVDTGLYFSVKTNI

SEQ ID NO: 9960 - protein, 360 aa, -Artificial-Sequence
MALPVTALLLPLALLLHAARPDIQMTQSPSSLSASVGDRVTITCKASDHINNWLAWYQQKPGQAPKLLIYGATTLETGVPSRFSGSGSGTDYTLTISSLQPEDFATYYCQQSWNTPWTFGQGTKLEIKRGGGGSGGGGSGGGGSQVQLQQPGAELVKPGASVKMSCKASGYAFSSYWINWMKQKPGQGLEWIGQIYPGDGDTNYNGKFKGRATLTADTSSSTAYMQLSSLTSEDSAVYFCARSITTVVGCAMDYWGQGTSVTVSSTRKIEVMYPPPYLDNEKSNGTIIHVKGARAGTVLLLRAGFYAVSFLSVAVGSTVYYQGKCLTWKGPRRQLPAVVPAPLPPPCGSSAHLLPPVPGG

SEQ ID NO: 9961 - protein, 378 aa, -Artificial-Sequence
MALPVTALLLPLALLLHAARPDIQMTQSPSSLSASVGDRVTITCKASDHINNWLAWYQQKPGQAPKLLIYGATTLETGVPSRFSGSGSGTDYTLTISSLQPEDFATYYCQQSWNTPWTFGQGTKLEIKRGGGGSGGGGSGGGGSQVQLQQPGAELVKPGASVKMSCKASGYAFSSYWINWMKQKPGQGLEWIGQIYPGDGDTNYNGKFKGRATLTADTSSSTAYMQLSSLTSEDSAVYFCARSITTVVGCAMDYWGQGTSVTVSSTRKIEVMYPPPYLDNEKSNGTIIHVKGARLVPVFCGLLVAKSLVLSALLVWWGDIWWKTMMELRSLDTQKATCHLQQVTDLPWTSVSSPVEREILYHTVARTKISDDDDEHTL

SEQ ID NO: 9962 - protein, 340 aa, -Artificial-Sequence
MALPVTALLLPLALLLHAARPDIQMTQSPSSLSASVGDRVTITCKASDHINNWLAWYQQKPGQAPKLLIYGATTLETGVPSRFSGSGSGTDYTLTISSLQPEDFATYYCQQSWNTPWTFGQGTKLEIKRGGGGSGGGGSGGGGSQVQLQQPGAELVKPGASVKMSCKASGYAFSSYWINWMKQKPGQGLEWIGQIYPGDGDTNYNGKFKGRATLTADTSSSTAYMQLSSLTSEDSAVYFCARSITTVVGCAMDYWGQGTSVTVSSTRKIEVMYPPPYLDNEKSNGTIIHVKGARMGLAFLVLVALVWFLVEDWLSRKRTRERASRASTWEGRRRLNTQTL

SEQ ID NO: 9963 - protein, 399 aa, -Artificial-Sequence
MALPVTALLLPLALLLHAARPDIQMTQSPSSLSASVGDRVTITCKASDHINNWLAWYQQKPGQAPKLLIYGATTLETGVPSRFSGSGSGTDYTLTISSLQPEDFATYYCQQSWNTPWTFGQGTKLEIKRGGGGSGGGGSGGGGSQVQLQQPGAELVKPGASVKMSCKASGYAFSSYWINWMKQKPGQGLEWIGQIYPGDGDTNYNGKFKGRATLTADTSSSTAYMQLSSLTSEDSAVYFCARSITTVVGCAMDYWGQGTSVTVSSTRKIEVMYPPPYLDNEKSNGTIIHVKGARLHILIGTSVVIILFILLFFLLHRWCSNKKNAAVMDQESAGNRTANSEDSDEQDPQEVTYTQLNHCVFTQRKITRPSQRPKTPPTDIIVYTELPNAESRSKVVSCP

SEQ ID NO: 9964 - protein, 399 aa, -Artificial-Sequence; identical to SEQ ID NO: 9963

SEQ ID NO: 9965 - protein, 390 aa, -Artificial-Sequence
MALPVTALLLPLALLLHAARPDIQMTQSPSSLSASVGDRVTITCKASDHINNWLAWYQQKPGQAPKLLIYGATTLETGVPSRFSGSGSGTDYTLTISSLQPEDFATYYCQQSWNTPWTFGQGTKLEIKRGGGGSGGGGSGGGGSQVQLQQPGAELVKPGASVKMSCKASGYAFSSYWINWMKQKPGQGLEWIGQIYPGDGDTNYNGKFKGRATLTADTSSSTAYMQLSSLTSEDSAVYFCARSITTVVGCAMDYWGQGTSVTVSSTRKIEVMYPPPYLDNEKSNGTIIHVKGARVLIGTSVVIILFILLLFFLLHRWCCNKKNAVVMDQEPAGNRTVNREDSDEQDPQEVTYAQLNHCVFTQRKITRPSQRPKTPPTDIIVYTELPNAEP

SEQ ID NO: 9966 - protein, 431 aa, -Artificial-Sequence
MALPVTALLLPLALLLHAARPDIQMTQSPSSLSASVGDRVTITCKASDHINNWLAWYQQKPGQAPKLLIYGATTLETGVPSRFSGSGSGTDYTLTISSLQPEDFATYYCQQSWNTPWTFGQGTKLEIKRGGGGSGGGGSGGGGSQVQLQQPGAELVKPGASVKMSCKASGYAFSSYWINWMKQKPGQGLEWIGQIYPGDGDTNYNGKFKGRATLTADTSSSTAYMQLSSLTSEDSAVYFCARSITTVVGCAMDYWGQGTSVTVSSTRKIEVMYPPPYLDNEKSNGTIIHVKGARLHILIGTSVAIILFIILFFFLLHCCCSNKKNAAVMDQEPAGDRTVNREDSDDQDPQEVTYAQLDHCVFTQTKITSPSQRPKTPPTDTTMYMELPNAKPRSLSPAHKHHSQALRGSSRETTALSQNRVASSHVPAAGI

SEQ ID NO: 9967 - protein, 431 aa, -Artificial-Sequence
MALPVTALLLPLALLLHAARPDIQMTQSPSSLSASVGDRVTITCKASDHINNWLAWYQQKPGQAPKLLIYGATTLETGVPSRFSGSGSGTDYTLTISSLQPEDFATYYCQQSWNTPWTFGQGTKLEIKRGGGGSGGGGSGGGGSQVQLQQPGAELVKPGASVKMSCKASGYAFSSYWINWMKQKPGQGLEWIGQIYPGDGDTNYNGKFKGRATLTADTSSSTAYMQLSSLTSEDSAVYFCARSITTVVGCAMDYWGQGTSVTVSSTRKIEVMYPPPYLDNEKSNGTIIHVKGARLHILIGTSVAIILFIILFFFLLHCCCSNKKNAAVMDQGPAGDRTVNREDSDDQDPQEVTYAQLDHCVFTQTKITSPSQRPKAPPTDTTMYMELPNAKPRSLSPAHKHHSQALRGSSRETTALSQNRVASSHVPAAGI

SEQ ID NO: 9968 - protein, 400 aa, -Artificial-Sequence
MALPVTALLLPLALLLHAARPDIQMTQSPSSLSASVGDRVTITCKASDHINNWLAWYQQKPGQAPKLLIYGATTLETGVPSRFSGSGSGTDYTLTISSLQPEDFATYYCQQSWNTPWTFGQGTKLEIKRGGGGSGGGGSGGGGSQVQLQQPGAELVKPGASVKMSCKASGYAFSSYWINWMKQKPGQGLEWIGQIYPGDGDTNYNGKFKGRATLTADTSSSTAYMQLSSLTSEDSAVYFCARSITTVVGCAMDYWGQGTSVTVSSTRKIEVMYPPPYLDNEKSNGTIIHVKGARLHILIGTSVVIILFILLLFFLLHLWCSNKKNAAVMDQEPAGNRTANSEDSDEQDPEEVTYAQLDHCVFTQRKITRPSQRPKTPPTDTILYTELPNAKPRSKVVSCP

SEQ ID NO: 9969 - protein, 409 aa, -Artificial-Sequence
MALPVTALLLPLALLLHAARPDIQMTQSPSSLSASVGDRVTITCKASDHINNWLAWYQQKPGQAPKLLIYGATTLETGVPSRFSGSGSGTDYTLTISSLQPEDFATYYCQQSWNTPWTFGQGTKLEIKRGGGGSGGGGSGGGGSQVQLQQPGAELVKPGASVKMSCKASGYAFSSYWINWMKQKPGQGLEWIGQIYPGDGDTNYNGKFKGRATLTADTSSSTAYMQLSSLTSEDSAVYFCARSITTVVGCAMDYWGQGTSVTVSSTRKIEVMYPPPYLDNEKSNGTIIHVKGARVLIGTSVVIFLFILLLFFLLYRWCSNKKNAAVMDQEPAGDRTVNRQDSDEQDPQEVTYAQLDHCVFIQRKISRPSQRPKTPLTDTSVYTELPNAEPRSKVVSCPRAPQSGLEGVF

SEQ ID NO: 9970 - protein, 409 aa, -Artificial-Sequence; identical to SEQ ID NO: 9969

SEQ ID NO: 9971 - protein, 382 aa, -Artificial-Sequence
MALPVTALLLPLALLLHAARPDIQMTQSPSSLSASVGDRVTITCKASDHINNWLAWYQQKPGQAPKLLIYGATTLETGVPSRFSGSGSGTDYTLTISSLQPEDFATYYCQQSWNTPWTFGQGTKLEIKRGGGGSGGGGSGGGGSQVQLQQPGAELVKPGASVKMSCKASGYAFSSYWINWMKQKPGQGLEWIGQIYPGDGDTNYNGKFKGRATLTADTSSSTAYMQLSSLTSEDSAVYFCARSITTVVGCAMDYWGQGTSVTVSSTRKIEVMYPPPYLDNEKSNGTIIHVKGARHVLIGTSVVIIPFAILLFFLLHRWCANKKNAVVMDQEPAGNRTVNREDSDEQDPQEVTYAQLNHCVFTQRKITRPSQRPKTPPTDTSV

SEQ ID NO: 9972 - protein, 429 aa, -Artificial-Sequence
MALPVTALLLPLALLLHAARPDIQMTQSPSSLSASVGDRVTITCKASDHINNWLAWYQQKPGQAPKLLIYGATTLETGVPSRFSGSGSGTDYTLTISSLQPEDFATYYCQQSWNTPWTFGQGTKLEIKRGGGGSGGGGSGGGGSQVQLQQPGAELVKPGASVKMSCKASGYAFSSYWINWMKQKPGQGLEWIGQIYPGDGDTNYNGKFKGRATLTADTSSSTAYMQLSSLTSEDSAVYFCARSITTVVGCAMDYWGQGTSVTVSSTRKIEVMYPPPYLDNEKSNGTIIHVKGARAVIRYSVAIILFTILPFFLLHRWCSKKKNAAVMNQEPAGHRTVNREDSDEQDPQEVTYAQLDHCIFTQRKITGPSQRSKRPSTDTSVCIELPNAEPRALSPAHEHHSQALMGSSRETTALSQTQLASSNVPAAGI

SEQ ID NO: 9973 - protein, 325 aa, -Artificial-Sequence
MALPVTALLLPLALLLHAARPDIQMTQSPSSLSASVGDRVTITCKASDHINNWLAWYQQKPGQAPKLLIYGATTLETGVPSRFSGSGSGTDYTLTISSLQPEDFATYYCQQSWNTPWTFGQGTKLEIKRGGGGSGGGGSGGGGSQVQLQQPGAELVKPGASVKMSCKASGYAFSSYWINWMKQKPGQGLEWIGQIYPGDGDTNYNGKFKGRATLTADTSSSTAYMQLSSLTSEDSAVYFCARSITTVVGCAMDYWGQGTSVTVSSTRKIEVMYPPPYLDNEKSNGTIIHVKGARAVIRYSVAIILFTILPFFLLHRWCSKKKMLL

SEQ ID NO: 9974 - protein, 353 aa, -Artificial-Sequence
MALPVTALLLPLALLLHAARPDIQMTQSPSSLSASVGDRVTITCKASDHINNWLAWYQQKPGQAPKLLIYGATTLETGVPSRFSGSGSGTDYTLTISSLQPEDFATYYCQQSWNTPWTFGQGTKLEIKRGGGGSGGGGSGGGGSQVQLQQPGAELVKPGASVKMSCKASGYAFSSYWINWMKQKPGQGLEWIGQIYPGDGDTNYNGKFKGRATLTADTSSSTAYMQLSSLTSEDSAVYFCARSITTVVGCAMDYWGQGTSVTVSSTRKIEVMYPPPYLDNEKSNGTIIHVKGARVLIGTSVVKIPFTILLFFLLHRWCSDKKNAAVMDQEPAGNRTVNSEDSDEQDHQEVSYA

SEQ ID NO: 9975 - protein, 353 aa, -Artificial-Sequence
MALPVTALLLPLALLLHAARPDIQMTQSPSSLSASVGDRVTITCKASDHINNWLAWYQQKPGQAPKLLIYGATTLETGVPSRFSGSGSGTDYTLTISSLQPEDFATYYCQQSWNTPWTFGQGTKLEIKRGGGGSGGGGSGGGGSQVQLQQPGAELVKPGASVKMSCKASGYAFSSYWINWMKQKPGQGLEWIGQIYPGDGDTNYNGKFKGRATLTADTSSSTAYMQLSSLTSEDSAVYFCARSITTVVGCAMDYWGQGTSVTVSSTRKIEVMYPPPYLDNEKSNGTIIHVKGARVLIGTSVVKIPFTILLFFLLHRWCSNKKNAAVMDQEPAGNRTVNSEDSDEQDHQEVSYA

SEQ ID NO: 9976 - protein, 353 aa, -Artificial-Sequence
MALPVTALLLPLALLLHAARPDIQMTQSPSSLSASVGDRVTITCKASDHINNWLAWYQQKPGQAPKLLIYGATTLETGVPSRFSGSGSGTDYTLTISSLQPEDFATYYCQQSWNTPWTFGQGTKLEIKRGGGGSGGGGSGGGGSQVQLQQPGAELVKPGASVKMSCKASGYAFSSYWINWMKQKPGQGLEWIGQIYPGDGDTNYNGKFKGRATLTADTSSSTAYMQLSSLTSEDSAVYFCARSITTVVGCAMDYWGQGTSVTVSSTRKIEVMYPPPYLDNEKSNGTIIHVKGARVLIGTSVVKLPFTILLFFLLHRWCSDKKNASVMDQGPAGNRTVNREDSDEQDHQEVSYA

SEQ ID NO: 9977 - protein, 357 aa, -Artificial-Sequence
MALPVTALLLPLALLLHAARPDIQMTQSPSSLSASVGDRVTITCKASDHINNWLAWYQQKPGQAPKLLIYGATTLETGVPSRFSGSGSGTDYTLTISSLQPEDFATYYCQQSWNTPWTFGQGTKLEIKRGGGGSGGGGSGGGGSQVQLQQPGAELVKPGASVKMSCKASGYAFSSYWINWMKQKPGQGLEWIGQIYPGDGDTNYNGKFKGRATLTADTSSSTAYMQLSSLTSEDSAVYFCARSITTVVGCAMDYWGQGTSVTVSSTRKIEVMYPPPYLDNEKSNGTIIHVKGARLHVLIGTSVVKIPFTILLFFLLHRHRWCSDKKNAAVMDQEPAGNRTVNSEDSDEQDHQEVSYA

SEQ ID NO: 9978 - protein, 353 aa, -Artificial-Sequence
MALPVTALLLPLALLLHAARPDIQMTQSPSSLSASVGDRVTITCKASDHINNWLAWYQQKPGQAPKLLIYGATTLETGVPSRFSGSGSGTDYTLTISSLQPEDFATYYCQQSWNTPWTFGQGTKLEIKRGGGGSGGGGSGGGGSQVQLQQPGAELVKPGASVKMSCKASGYAFSSYWINWMKQKPGQGLEWIGQIYPGDGDTNYNGKFKGRATLTADTSSSTAYMQLSSLTSEDSAVYFCARSITTVVGCAMDYWGQGTSVTVSSTRKIEVMYPPPYLDNEKSNGTIIHVKGARVLIGTSVVKLPFTILLFFLLHRWCSNKKNASVMDQGPAGNRTVNREDSDEQDHQEVSYA

SEQ ID NO: 9979 - protein, 338 aa, -Artificial-Sequence
MALPVTALLLPLALLLHAARPDIQMTQSPSSLSASVGDRVTITCKASDHINNWLAWYQQKPGQAPKLLIYGATTLETGVPSRFSGSGSGTDYTLTISSLQPEDFATYYCQQSWNTPWTFGQGTKLEIKRGGGGSGGGGSGGGGSQVQLQQPGAELVKPGASVKMSCKASGYAFSSYWINWMKQKPGQGLEWIGQIYPGDGDTNYNGKFKGRATLTADTSSSTAYMQLSSLTSEDSAVYFCARSITTVVGCAMDYWGQGTSVTVSSTRKIEVMYPPPYLDNEKSNGTIIHVKGARLHILIGTSVVKIPFTILLFFLLHRWCSNKKKCCCNGPRACREQK

SEQ ID NO: 9980 - protein, 400 aa, -Artificial-Sequence
MALPVTALLLPLALLLHAARPDIQMTQSPSSLSASVGDRVTITCKASDHINNWLAWYQQKPGQAPKLLIYGATTLETGVPSRFSGSGSGTDYTLTISSLQPEDFATYYCQQSWNTPWTFGQGTKLEIKRGGGGSGGGGSGGGGSQVQLQQPGAELVKPGASVKMSCKASGYAFSSYWINWMKQKPGQGLEWIGQIYPGDGDTNYNGKFKGRATLTADTSSSTAYMQLSSLTSEDSAVYFCARSITTVVGCAMDYWGQGTSVTVSSTRKIEVMYPPPYLDNEKSNGTIIHVKGARILLLTLVSFLIFILFIIVQLFIMKLRKAHVIWKKENEVSEHTLESYRSRSNNEETSSEEKNGQSSHPMRCMNYITKLYSEAKTKRKENVQHSKLEEKHIQVPESIV

SEQ ID NO: 9981 - protein, 397 aa, -Artificial-Sequence
MALPVTALLLPLALLLHAARPDIQMTQSPSSLSASVGDRVTITCKASDHINNWLAWYQQKPGQAPKLLIYGATTLETGVPSRFSGSGSGTDYTLTISSLQPEDFATYYCQQSWNTPWTFGQGTKLEIKRGGGGSGGGGSGGGGSQVQLQQPGAELVKPGASVKMSCKASGYAFSSYWINWMKQKPGQGLEWIGQIYPGDGDTNYNGKFKGRATLTADTSSSTAYMQLSSLTSEDSAVYFCARSITTVVGCAMDYWGQGTSVTVSSTRKIEVMYPPPYLDNEKSNGTIIHVKGARLLGAMAATLVVICTAVIVVVALTRKKKALRIHSVEGDLRRKSAGQEEWSPSAPSPPGSCVQAEAAPAGLCGEQRGEDCAELHDYFNVLSYRSLGNCSFFTETG

SEQ ID NO: 9982 - protein, 417 aa, -Artificial-Sequence; identical to SEQ ID NO: 9921

SEQ ID NO: 9983 - protein, 403 aa, -Artificial-Sequence
MALPVTALLLPLALLLHAARPDIQMTQSPSSLSASVGDRVTITCKASDHINNWLAWYQQKPGQAPKLLIYGATTLETGVPSRFSGSGSGTDYTLTISSLQPEDFATYYCQQSWNTPWTFGQGTKLEIKRGGGGSGGGGSGGGGSQVQLQQPGAELVKPGASVKMSCKASGYAFSSYWINWMKQKPGQGLEWIGQIYPGDGDTNYNGKFKGRATLTADTSSSTAYMQLSSLTSEDSAVYFCARSITTVVGCAMDYWGQGTSVTVSSTRKIEVMYPPPYLDNEKSNGTIIHVKGARVLLCLLLVPLLLSLFVLGLFLWFLKRERQEEYIEEKKRVDICRETPNICPHSGENTEYDTIPHTNRTILKEDPANTVYSTVEIPKKMENPHSLLTMPDTPRLFAYENVI

SEQ ID NO: 9984 - protein, 363 aa, -Artificial-Sequence
MALPVTALLLPLALLLHAARPDIQMTQSPSSLSASVGDRVTITCKASDHINNWLAWYQQKPGQAPKLLIYGATTLETGVPSRFSGSGSGTDYTLTISSLQPEDFATYYCQQSWNTPWTFGQGTKLEIKRGGGGSGGGGSGGGGSQVQLQQPGAELVKPGASVKMSCKASGYAFSSYWINWMKQKPGQGLEWIGQIYPGDGDTNYNGKFKGRATLTADTSSSTAYMQLSSLTSEDSAVYFCARSITTVVGCAMDYWGQGTSVTVSSTRKIEVMYPPPYLDNEKSNGTIIHVKGARILVIFSGMFLVFTLAGALFLHQRRKYRSNKGESPVEPAEPCHYSCPREEEGSTIPIQEDYRKPEPACSP

SEQ ID NO: 9985 - protein, 416 aa, -Artificial-Sequence
MALPVTALLLPLALLLHAARPDIQMTQSPSSLSASVGDRVTITCKASDHINNWLAWYQQKPGQAPKLLIYGATTLETGVPSRFSGSGSGTDYTLTISSLQPEDFATYYCQQSWNTPWTFGQGTKLEIKRGGGGSGGGGSGGGGSQVQLQQPGAELVKPGASVKMSCKASGYAFSSYWINWMKQKPGQGLEWIGQIYPGDGDTNYNGKFKGRATLTADTSSSTAYMQLSSLTSEDSAVYFCARSITTVVGCAMDYWGQGTSVTVSSTRKIEVMYPPPYLDNEKSNGTIIHVKGARILIGVSVVFLFCLLLLVLFCLHRQNQIKQGPPRSKDEEQKPQQRPDLAVDVLERTADKATVNGLPEKDRETDTSALAAGSSQEVTYAQLDHWALTQRTARAVSPQSTKPMAESITYAAVARH

SEQ ID NO: 9986 - protein, 487 aa, -Artificial-Sequence
MALPVTALLLPLALLLHAARPDIQMTQSPSSLSASVGDRVTITCKASDHINNWLAWYQQKPGQAPKLLIYGATTLETGVPSRFSGSGSGTDYTLTISSLQPEDFATYYCQQSWNTPWTFGQGTKLEIKRGGGGSGGGGSGGGGSQVQLQQPGAELVKPGASVKMSCKASGYAFSSYWINWMKQKPGQGLEWIGQIYPGDGDTNYNGKFKGRATLTADTSSSTAYMQLSSLTSEDSAVYFCARSITTVVGCAMDYWGQGTSVTVSSTRKIEVMYPPPYLDNEKSNGTIIHVKGARLGVVIGILVAVILLLLLLLLLFLILRHRRQGKHWTSTQRKADFQHPAGAVGPEPTDRGLQWRSSPAADAQEENLYAAVKHTQPEDGVEMDTRQSPHDEDPQAVTYAEVKHSRPRREMASPPSPLSGEFLDTKDRQAEEDRQMDTEAAASEAPQDVTYAQLHSLTLRREATEPPPSQEGPSPAVPSIYATLAIH

SEQ ID NO: 9987 - protein, 363 aa, -Artificial-Sequence
MALPVTALLLPLALLLHAARPDIQMTQSPSSLSASVGDRVTITCKASDHINNWLAWYQQKPGQAPKLLIYGATTLETGVPSRFSGSGSGTDYTLTISSLQPEDFATYYCQQSWNTPWTFGQGTKLEIKRGGGGSGGGGSGGGGSQVQLQQPGAELVKPGASVKMSCKASGYAFSSYWINWMKQKPGQGLEWIGQIYPGDGDTNYNGKFKGRATLTADTSSSTAYMQLSSLTSEDSAVYFCARSITTVVGCAMDYWGQGTSVTVSSTRKIEVMYPPPYLDNEKSNGTIIHVKGARIISFFLALTSTALLFLLFFLTLRFSVVKRGRKKLLYIFKQPFMRPVQTTQEEDGCSCRFPEEEEGGCEL

SEQ ID NO: 9988 - protein, 362 aa, -Artificial-Sequence
MALPVTALLLPLALLLHAARPDIQMTQSPSSLSASVGDRVTITCKASDHINNWLAWYQQKPGQAPKLLIYGATTLETGVPSRFSGSGSGTDYTLTISSLQPEDFATYYCQQSWNTPWTFGQGTKLEIKRGGGGSGGGGSGGGGSQVQLQQPGAELVKPGASVKMSCKASGYAFSSYWINWMKQKPGQGLEWIGQIYPGDGDTNYNGKFKGRATLTADTSSSTAYMQLSSLTSEDSAVYFCARSITTVVGCAMDYWGQGTSVTVSSTRKIEVMYPPPYLDNEKSNGTIIHVKGARFWVLVVVGGVLACYSLLVTVAFIIFWVRSKRSRLLHSDYMNMTPRRPGPTRKHYQPYAPPRDFAAYRS

SEQ ID NO: 9989 - protein, 357 aa, -Artificial-Sequence
MALPVTALLLPLALLLHAARPDIQMTQSPSSLSASVGDRVTITCKASDHINNWLAWYQQKPGQAPKLLIYGATTLETGVPSRFSGSGSGTDYTLTISSLQPEDFATYYCQQSWNTPWTFGQGTKLEIKRGGGGSGGGGSGGGGSQVQLQQPGAELVKPGASVKMSCKASGYAFSSYWINWMKQKPGQGLEWIGQIYPGDGDTNYNGKFKGRATLTADTSSSTAYMQLSSLTSEDSAVYFCARSITTVVGCAMDYWGQGTSVTVSSTRKIEVMYPPPYLDNEKSNGTIIHVKGARVAAILGLGLVLGLLGPLAILLALYLLRRDQRLPPDAHKPPGGGSFRTPIQEEQADAHSTLAKI

SEQ ID NO: 9990 - protein, 441 aa, -Artificial-Sequence
MALPVTALLLPLALLLHAARPDIQMTQSPSSLSASVGDRVTITCKASDHINNWLAWYQQKPGQAPKLLIYGATTLETGVPSRFSGSGSGTDYTLTISSLQPEDFATYYCQQSWNTPWTFGQGTKLEIKRGGGGSGGGGSGGGGSQVQLQQPGAELVKPGASVKMSCKASGYAFSSYWINWMKQKPGQGLEWIGQIYPGDGDTNYNGKFKGRATLTADTSSSTAYMQLSSLTSEDSAVYFCARSITTVVGCAMDYWGQGTSVTVSSTRKIEVMYPPPYLDNEKSNGTIIHVKGARFWVLVVVGGVLACYSLLVTVAFIIFWVWRRKRKEKQSETSPKEFLTIYEDVKDLKTRRNHEQEQTFPGGGSTIYSMIQSQSSAPTSQEPAYTLYSLIQPSRKSGSRKRNHSPSFNSTIYEVIGKSQPKAQNPARLSRKELENFDVYS

SEQ ID NO: 9991 - protein, 387 aa, -Artificial-Sequence
MALPVTALLLPLALLLHAARPDIQMTQSPSSLSASVGDRVTITCKASDHINNWLAWYQQKPGQAPKLLIYGATTLETGVPSRFSGSGSGTDYTLTISSLQPEDFATYYCQQSWNTPWTFGQGTKLEIKRGGGGSGGGGSGGGGSQVQLQQPGAELVKPGASVKMSCKASGYAFSSYWINWMKQKPGQGLEWIGQIYPGDGDTNYNGKFKGRATLTADTSSSTAYMQLSSLTSEDSAVYFCARSITTVVGCAMDYWGQGTSVTVSSTRKIEVMYPPPYLDNEKSNGTIIHVKGARSSSPMGIIVAVVTGIAVAAIVAAVVALIYCRKKRISALPGYPECREMGETLPEKPANPTNPDEADKVGAENTITYSLLMHPDALEEPDDQNRI

SEQ ID NO: 9992 - protein, 376 aa, -Artificial-Sequence
MALPVTALLLPLALLLHAARPDIQMTQSPSSLSASVGDRVTITCKASDHINNWLAWYQQKPGQAPKLLIYGATTLETGVPSRFSGSGSGTDYTLTISSLQPEDFATYYCQQSWNTPWTFGQGTKLEIKRGGGGSGGGGSGGGGSQVQLQQPGAELVKPGASVKMSCKASGYAFSSYWINWMKQKPGQGLEWIGQIYPGDGDTNYNGKFKGRATLTADTSSSTAYMQLSSLTSEDSAVYFCARSITTVVGCAMDYWGQGTSVTVSSTRKIEVMYPPPYLDNEKSNGTIIHVKGARVLFYLAVGIMFLVNTVLWVTIRKELKRKKKWDLEISLDSGHEKKVISSLQEDRHLEEELKCQEQKEEQLQEGVHRKEPQGAT

SEQ ID NO: 9993 - protein, 410 aa, -Artificial-Sequence
MALPVTALLLPLALLLHAARPDIQMTQSPSSLSASVGDRVTITCKASDHINNWLAWYQQKPGQAPKLLIYGATTLETGVPSRFSGSGSGTDYTLTISSLQPEDFATYYCQQSWNTPWTFGQGTKLEIKRGGGGSGGGGSGGGGSQVQLQQPGAELVKPGASVKMSCKASGYAFSSYWINWMKQKPGQGLEWIGQIYPGDGDTNYNGKFKGRATLTADTSSSTAYMQLSSLTSEDSAVYFCARSITTVVGCAMDYWGQGTSVTVSSTRQSFGLLDPKLCYLLDGILFIYGVILTALFLRVKFSRSADAPAYQQGQNQLYNELNLGRREEYDVLDKRRGRDPEMGGKPQRRKNPQEGLYNELQKDKMAEAYSEIGMKGERRRGKGHDGLYQGLSTATKDTYDALHMQALPPR

SEQ ID NO: 9994 - protein, 452 aa, -Artificial-Sequence
MALPVTALLLPLALLLHAARPDIQMTQSPSSLSASVGDRVTITCKASDHINNWLAWYQQKPGQAPKLLIYGATTLETGVPSRFSGSGSGTDYTLTISSLQPEDFATYYCQQSWNTPWTFGQGTKLEIKRGGGGSGGGGSGGGGSQVQLQQPGAELVKPGASVKMSCKASGYAFSSYWINWMKQKPGQGLEWIGQIYPGDGDTNYNGKFKGRATLTADTSSSTAYMQLSSLTSEDSAVYFCARSITTVVGCAMDYWGQGTSVTVSSTRQSFGLLDPKLCYLLDGILFIYGVILTALFLKRGRKKLLYIFKQPFMRPVQTTQEEDGCSCRFPEEEEGGCELRVKFSRSADAPAYQQGQNQLYNELNLGRREEYDVLDKRRGRDPEMGGKPQRRKNPQEGLYNELQKDKMAEAYSEIGMKGERRRGKGHDGLYQGLSTATKDTYDALHMQALPPR

SEQ ID NO: 9995 - protein, 451 aa, -Artificial-Sequence
MALPVTALLLPLALLLHAARPDIQMTQSPSSLSASVGDRVTITCKASDHINNWLAWYQQKPGQAPKLLIYGATTLETGVPSRFSGSGSGTDYTLTISSLQPEDFATYYCQQSWNTPWTFGQGTKLEIKRGGGGSGGGGSGGGGSQVQLQQPGAELVKPGASVKMSCKASGYAFSSYWINWMKQKPGQGLEWIGQIYPGDGDTNYNGKFKGRATLTADTSSSTAYMQLSSLTSEDSAVYFCARSITTVVGCAMDYWGQGTSVTVSSTRQSFGLLDPKLCYLLDGILFIYGVILTALFLRSKRSRLLHSDYMNMTPRRPGPTRKHYQPYAPPRDFAAYRSRVKFSRSADAPAYQQGQNQLYNELNLGRREEYDVLDKRRGRDPEMGGKPQRRKNPQEGLYNELQKDKMAEAYSEIGMKGERRRGKGHDGLYQGLSTATKDTYDALHMQALPPR

SEQ ID NO: 9996 - protein, 446 aa, -Artificial-Sequence
MALPVTALLLPLALLLHAARPDIQMTQSPSSLSASVGDRVTITCKASDHINNWLAWYQQKPGQAPKLLIYGATTLETGVPSRFSGSGSGTDYTLTISSLQPEDFATYYCQQSWNTPWTFGQGTKLEIKRGGGGSGGGGSGGGGSQVQLQQPGAELVKPGASVKMSCKASGYAFSSYWINWMKQKPGQGLEWIGQIYPGDGDTNYNGKFKGRATLTADTSSSTAYMQLSSLTSEDSAVYFCARSITTVVGCAMDYWGQGTSVTVSSTRQSFGLLDPKLCYLLDGILFIYGVILTALFLRDQRLPPDAHKPPGGGSFRTPIQEEQADAHSTLAKIRVKFSRSADAPAYQQGQNQLYNELNLGRREEYDVLDKRRGRDPEMGGKPQRRKNPQEGLYNELQKDKMAEAYSEIGMKGERRRGKGHDGLYQGLSTATKDTYDALHMQALPPR

SEQ ID NO: 9997 - protein, 530 aa, -Artificial-Sequence
MALPVTALLLPLALLLHAARPDIQMTQSPSSLSASVGDRVTITCKASDHINNWLAWYQQKPGQAPKLLIYGATTLETGVPSRFSGSGSGTDYTLTISSLQPEDFATYYCQQSWNTPWTFGQGTKLEIKRGGGGSGGGGSGGGGSQVQLQQPGAELVKPGASVKMSCKASGYAFSSYWINWMKQKPGQGLEWIGQIYPGDGDTNYNGKFKGRATLTADTSSSTAYMQLSSLTSEDSAVYFCARSITTVVGCAMDYWGQGTSVTVSSTRQSFGLLDPKLCYLLDGILFIYGVILTALFLWRRKRKEKQSETSPKEFLTIYEDVKDLKTRRNHEQEQTFPGGGSTIYSMIQSQSSAPTSQEPAYTLYSLIQPSRKSGSRKRNHSPSFNSTIYEVIGKSQPKAQNPARLSRKELENFDVYSRVKFSRSADAPAYQQGQNQLYNELNLGRREEYDVLDKRRGRDPEMGGKPQRRKNPQEGLYNELQKDKMAEAYSEIGMKGERRRGKGHDGLYQGLSTATKDTYDALHMQALPPR

SEQ ID NO: 9998 - protein, 410 aa, -Artificial-Sequence
MALPVTALLLPLALLLHAARPDIQMTQSPSSLSASVGDRVTITCKASDHINNWLAWYQQKPGQAPKLLIYGATTLETGVPSRFSGSGSGTDYTLTISSLQPEDFATYYCQQSWNTPWTFGQGTKLEIKRGGGGSGGGGSGGGGSQVQLQQPGAELVKPGASVKMSCKASGYAFSSYWINWMKQKPGQGLEWIGQIYPGDGDTNYNGKFKGRATLTADTSSSTAYMQLSSLTSEDSAVYFCARSITTVVGCAMDYWGQGTSVTVSSTRQSFGLLDPKLSYLLDGILFIYGVILTALFLRVKFSRSADAPAYQQGQNQLYNELNLGRREEYDVLDKRRGRDPEMGGKPQRRKNPQEGLYNELQKDKMAEAYSEIGMKGERRRGKGHDGLYQGLSTATKDTYDALHMQALPPR

SEQ ID NO: 9999 - protein, 410 aa, -Artificial-Sequence
MALPVTALLLPLALLLHAARPDIQMTQSPSSLSASVGDRVTITCKASDHINNWLAWYQQKPGQAPKLLIYGATTLETGVPSRFSGSGSGTDYTLTISSLQPEDFATYYCQQSWNTPWTFGQGTKLEIKRGGGGSGGGGSGGGGSQVQLQQPGAELVKPGASVKMSCKASGYAFSSYWINWMKQKPGQGLEWIGQIYPGDGDTNYNGKFKGRATLTADTSSSTAYMQLSSLTSEDSAVYFCARSITTVVGCAMDYWGQGTSVTVSSTRQSFGLLDPKLCYLLDGILFIYGVILTALFLRVKFSRSADAPAYQQGQNQLYNELNLGRREEYDVLDKRRGRDPEMGGKPQRRKNPQEGLFNELQKDKMAEAFSEIGMKGERRRGKGHDGLFQGLSTATKDTFDALHMQALPPR

SEQ ID NO: 10000 - protein, 341 aa, -Artificial-Sequence
MALPVTALLLPLALLLHAARPDIQMTQSPSSLSASVGDRVTITCKASDHINNWLAWYQQKPGQAPKLLIYGATTLETGVPSRFSGSGSGTDYTLTISSLQPEDFATYYCQQSWNTPWTFGQGTKLEIKRGGGGSGGGGSGGGGSQVQLQQPGAELVKPGASVKMSCKASGYAFSSYWINWMKQKPGQGLEWIGQIYPGDGDTNYNGKFKGRATLTADTSSSTAYMQLSSLTSEDSAVYFCARSITTVVGCAMDYWGQGTSVTVSSTRTTPGERSSLPAFYPGTSGSCSGCGSLSLPLLAGLVAADAVASLLIVGAVFLCARPRRSPAQEDGKVYINMPGRG

SEQ ID NO: 10001 - protein, 383 aa, -Artificial-Sequence
MALPVTALLLPLALLLHAARPDIQMTQSPSSLSASVGDRVTITCKASDHINNWLAWYQQKPGQAPKLLIYGATTLETGVPSRFSGSGSGTDYTLTISSLQPEDFATYYCQQSWNTPWTFGQGTKLEIKRGGGGSGGGGSGGGGSQVQLQQPGAELVKPGASVKMSCKASGYAFSSYWINWMKQKPGQGLEWIGQIYPGDGDTNYNGKFKGRATLTADTSSSTAYMQLSSLTSEDSAVYFCARSITTVVGCAMDYWGQGTSVTVSSTRTTPGERSSLPAFYPGTSGSCSGCGSLSLPLLAGLVAADAVASLLIVGAVFKRGRKKLLYIFKQPFMRPVQTTQEEDGCSCRFPEEEEGGCELLCARPRRSPAQEDGKVYINMPGRG

SEQ ID NO: 10002 - protein, 382 aa, -Artificial-Sequence
MALPVTALLLPLALLLHAARPDIQMTQSPSSLSASVGDRVTITCKASDHINNWLAWYQQKPGQAPKLLIYGATTLETGVPSRFSGSGSGTDYTLTISSLQPEDFATYYCQQSWNTPWTFGQGTKLEIKRGGGGSGGGGSGGGGSQVQLQQPGAELVKPGASVKMSCKASGYAFSSYWINWMKQKPGQGLEWIGQIYPGDGDTNYNGKFKGRATLTADTSSSTAYMQLSSLTSEDSAVYFCARSITTVVGCAMDYWGQGTSVTVSSTRTTPGERSSLPAFYPGTSGSCSGCGSLSLPLLAGLVAADAVASLLIVGAVFRSKRSRLLHSDYMNMTPRRPGPTRKHYQPYAPPRDFAAYRSLCARPRRSPAQEDGKVYINMPGRG

SEQ ID NO: 10003 - protein, 377 aa, -Artificial-Sequence
MALPVTALLLPLALLLHAARPDIQMTQSPSSLSASVGDRVTITCKASDHINNWLAWYQQKPGQAPKLLIYGATTLETGVPSRFSGSGSGTDYTLTISSLQPEDFATYYCQQSWNTPWTFGQGTKLEIKRGGGGSGGGGSGGGGSQVQLQQPGAELVKPGASVKMSCKASGYAFSSYWINWMKQKPGQGLEWIGQIYPGDGDTNYNGKFKGRATLTADTSSSTAYMQLSSLTSEDSAVYFCARSITTVVGCAMDYWGQGTSVTVSSTRTTPGERSSLPAFYPGTSGSCSGCGSLSLPLLAGLVAADAVASLLIVGAVFRDQRLPPDAHKPPGGGSFRTPIQEEQADAHSTLAKILCARPRRSPAQEDGKVYINMPGRG

SEQ ID NO: 10004 - protein, 461 aa, -Artificial-Sequence
MALPVTALLLPLALLLHAARPDIQMTQSPSSLSASVGDRVTITCKASDHINNWLAWYQQKPGQAPKLLIYGATTLETGVPSRFSGSGSGTDYTLTISSLQPEDFATYYCQQSWNTPWTFGQGTKLEIKRGGGGSGGGGSGGGGSQVQLQQPGAELVKPGASVKMSCKASGYAFSSYWINWMKQKPGQGLEWIGQIYPGDGDTNYNGKFKGRATLTADTSSSTAYMQLSSLTSEDSAVYFCARSITTVVGCAMDYWGQGTSVTVSSTRTTPGERSSLPAFYPGTSGSCSGCGSLSLPLLAGLVAADAVASLLIVGAVFWRRKRKEKQSETSPKEFLTIYEDVKDLKTRRNHEQEQTFPGGGSTIYSMIQSQSSAPTSQEPAYTLYSLIQPSRKSGSRKRNHSPSFNSTIYEVIGKSQPKAQNPARLSRKELENFDVYSLCARPRRSPAQEDGKVYINMPGRG

SEQ ID NO: 10005 - protein, 377 aa, -Artificial-Sequence
MALPVTALLLPLALLLHAARPDIQMTQSPSSLSASVGDRVTITCKASDHINNWLAWYQQKPGQAPKLLIYGATTLETGVPSRFSGSGSGTDYTLTISSLQPEDFATYYCQQSWNTPWTFGQGTKLEIKRGGGGSGGGGSGGGGSQVQLQQPGAELVKPGASVKMSCKASGYAFSSYWINWMKQKPGQGLEWIGQIYPGDGDTNYNGKFKGRATLTADTSSSTAYMQLSSLTSEDSAVYFCARSITTVVGCAMDYWGQGTSVTVSSTRLGEPQLCYILDAILFLYGIVLTLLYCKRGRKKLLYIFKQPFMRPVQTTQEEDGCSCRFPEEEEGGCELRLKIQVRKAAITSYEKSDGVYTGLSTRNQETYETLKHEKPPQ

SEQ ID NO: 10006 - protein, 376 aa, -Artificial-Sequence
MALPVTALLLPLALLLHAARPDIQMTQSPSSLSASVGDRVTITCKASDHINNWLAWYQQKPGQAPKLLIYGATTLETGVPSRFSGSGSGTDYTLTISSLQPEDFATYYCQQSWNTPWTFGQGTKLEIKRGGGGSGGGGSGGGGSQVQLQQPGAELVKPGASVKMSCKASGYAFSSYWINWMKQKPGQGLEWIGQIYPGDGDTNYNGKFKGRATLTADTSSSTAYMQLSSLTSEDSAVYFCARSITTVVGCAMDYWGQGTSVTVSSTRLGEPQLCYILDAILFLYGIVLTLLYCRSKRSRLLHSDYMNMTPRRPGPTRKHYQPYAPPRDFAAYRSRLKIQVRKAAITSYEKSDGVYTGLSTRNQETYETLKHEKPPQ

SEQ ID NO: 10007 - protein, 371 aa, -Artificial-Sequence
MALPVTALLLPLALLLHAARPDIQMTQSPSSLSASVGDRVTITCKASDHINNWLAWYQQKPGQAPKLLIYGATTLETGVPSRFSGSGSGTDYTLTISSLQPEDFATYYCQQSWNTPWTFGQGTKLEIKRGGGGSGGGGSGGGGSQVQLQQPGAELVKPGASVKMSCKASGYAFSSYWINWMKQKPGQGLEWIGQIYPGDGDTNYNGKFKGRATLTADTSSSTAYMQLSSLTSEDSAVYFCARSITTVVGCAMDYWGQGTSVTVSSTRLGEPQLCYILDAILFLYGIVLTLLYCRDQRLPPDAHKPPGGGSFRTPIQEEQADAHSTLAKIRLKIQVRKAAITSYEKSDGVYTGLSTRNQETYETLKHEKPPQ

SEQ ID NO: 10008 - protein, 455 aa, -Artificial-Sequence
MALPVTALLLPLALLLHAARPDIQMTQSPSSLSASVGDRVTITCKASDHINNWLAWYQQKPGQAPKLLIYGATTLETGVPSRFSGSGSGTDYTLTISSLQPEDFATYYCQQSWNTPWTFGQGTKLEIKRGGGGSGGGGSGGGGSQVQLQQPGAELVKPGASVKMSCKASGYAFSSYWINWMKQKPGQGLEWIGQIYPGDGDTNYNGKFKGRATLTADTSSSTAYMQLSSLTSEDSAVYFCARSITTVVGCAMDYWGQGTSVTVSSTRLGEPQLCYILDAILFLYGIVLTLLYCWRRKRKEKQSETSPKEFLTIYEDVKDLKTRRNHEQEQTFPGGGSTIYSMIQSQSSAPTSQEPAYTLYSLIQPSRKSGSRKRNHSPSFNSTIYEVIGKSQPKAQNPARLSRKELENFDVYSRLKIQVRKAAITSYEKSDGVYTGLSTRNQETYETLKHEKPPQ

SEQ ID NO: 10009 - protein, 335 aa, -Artificial-Sequence
MALPVTALLLPLALLLHAARPDIQMTQSPSSLSASVGDRVTITCKASDHINNWLAWYQQKPGQAPKLLIYGATTLETGVPSRFSGSGSGTDYTLTISSLQPEDFATYYCQQSWNTPWTFGQGTKLEIKRGGGGSGGGGSGGGGSQVQLQQPGAELVKPGASVKMSCKASGYAFSSYWINWMKQKPGQGLEWIGQIYPGDGDTNYNGKFKGRATLTADTSSSTAYMQLSSLTSEDSAVYFCARSITTVVGCAMDYWGQGTSVTVSSTRLGEPQLSYILDAILFLYGIVLTLLYCRLKIQVRKAAITSYEKSDGVYTGLSTRNQETYETLKHEKPPQ

SEQ ID NO: 10010 - protein, 353 aa, -Artificial-Sequence
MALPVTALLLPLALLLHAARPDIQMTQSPSSLSASVGDRVTITCKASDHINNWLAWYQQKPGQAPKLLIYGATTLETGVPSRFSGSGSGTDYTLTISSLQPEDFATYYCQQSWNTPWTFGQGTKLEIKRGGGGSGGGGSGGGGSQVQLQQPGAELVKPGASVKMSCKASGYAFSSYWINWMKQKPGQGLEWIGQIYPGDGDTNYNGKFKGRATLTADTSSSTAYMQLSSLTSEDSAVYFCARSITTVVGCAMDYWGQGTSVTVSSTRQAQSDCSCSTVSPGVLAGIVMGDLVLTVLIALAVYFLGRLVPRGRGAAEAATRKQRITETESPYQELQGQRSDVYSDLNTQRPYYK

SEQ ID NO: 10011 - protein, 353 aa, -Artificial-Sequence
MALPVTALLLPLALLLHAARPDIQMTQSPSSLSASVGDRVTITCKASDHINNWLAWYQQKPGQAPKLLIYGATTLETGVPSRFSGSGSGTDYTLTISSLQPEDFATYYCQQSWNTPWTFGQGTKLEIKRGGGGSGGGGSGGGGSQVQLQQPGAELVKPGASVKMSCKASGYAFSSYWINWMKQKPGQGLEWIGQIYPGDGDTNYNGKFKGRATLTADTSSSTAYMQLSSLTSEDSAVYFCARSITTVVGCAMDYWGQGTSVTVSSTRQAQSDCSSSTVSPGVLAGIVMGDLVLTVLIALAVYFLGRLVPRGRGAAEAATRKQRITETESPYQELQGQRSDVYSDLNTQRPYYK

SEQ ID NO: 10012 - protein, 395 aa, -Artificial-Sequence
MALPVTALLLPLALLLHAARPDIQMTQSPSSLSASVGDRVTITCKASDHINNWLAWYQQKPGQAPKLLIYGATTLETGVPSRFSGSGSGTDYTLTISSLQPEDFATYYCQQSWNTPWTFGQGTKLEIKRGGGGSGGGGSGGGGSQVQLQQPGAELVKPGASVKMSCKASGYAFSSYWINWMKQKPGQGLEWIGQIYPGDGDTNYNGKFKGRATLTADTSSSTAYMQLSSLTSEDSAVYFCARSITTVVGCAMDYWGQGTSVTVSSTRQAQSDCSCSTVSPGVLAGIVMGDLVLTVLIALAVYFLGRLVPRGRGAAEAATRKQRITETESPYQELQGQRSDVYSDLNTQKRGRKKLLYIFKQPFMRPVQTTQEEDGCSCRFPEEEEGGCELRPYYK

SEQ ID NO: 10013 - protein, 394 aa, -Artificial-Sequence
MALPVTALLLPLALLLHAARPDIQMTQSPSSLSASVGDRVTITCKASDHINNWLAWYQQKPGQAPKLLIYGATTLETGVPSRFSGSGSGTDYTLTISSLQPEDFATYYCQQSWNTPWTFGQGTKLEIKRGGGGSGGGGSGGGGSQVQLQQPGAELVKPGASVKMSCKASGYAFSSYWINWMKQKPGQGLEWIGQIYPGDGDTNYNGKFKGRATLTADTSSSTAYMQLSSLTSEDSAVYFCARSITTVVGCAMDYWGQGTSVTVSSTRQAQSDCSCSTVSPGVLAGIVMGDLVLTVLIALAVYFLGRLVPRGRGAAEAATRKQRITETESPYQELQGQRSDVYSDLNTQRSKRSRLLHSDYMNMTPRRPGPTRKHYQPYAPPRDFAAYRSRPYYK

SEQ ID NO: 10014 - protein, 389 aa, -Artificial-Sequence
MALPVTALLLPLALLLHAARPDIQMTQSPSSLSASVGDRVTITCKASDHINNWLAWYQQKPGQAPKLLIYGATTLETGVPSRFSGSGSGTDYTLTISSLQPEDFATYYCQQSWNTPWTFGQGTKLEIKRGGGGSGGGGSGGGGSQVQLQQPGAELVKPGASVKMSCKASGYAFSSYWINWMKQKPGQGLEWIGQIYPGDGDTNYNGKFKGRATLTADTSSSTAYMQLSSLTSEDSAVYFCARSITTVVGCAMDYWGQGTSVTVSSTRQAQSDCSCSTVSPGVLAGIVMGDLVLTVLIALAVYFLGRLVPRGRGAAEAATRKQRITETESPYQELQGQRSDVYSDLNTQRDQRLPPDAHKPPGGGSFRTPIQEEQADAHSTLAKIRPYYK

SEQ ID NO: 10015 - protein, 473 aa, -Artificial-Sequence
MALPVTALLLPLALLLHAARPDIQMTQSPSSLSASVGDRVTITCKASDHINNWLAWYQQKPGQAPKLLIYGATTLETGVPSRFSGSGSGTDYTLTISSLQPEDFATYYCQQSWNTPWTFGQGTKLEIKRGGGGSGGGGSGGGGSQVQLQQPGAELVKPGASVKMSCKASGYAFSSYWINWMKQKPGQGLEWIGQIYPGDGDTNYNGKFKGRATLTADTSSSTAYMQLSSLTSEDSAVYFCARSITTVVGCAMDYWGQGTSVTVSSTRQAQSDCSCSTVSPGVLAGIVMGDLVLTVLIALAVYFLGRLVPRGRGAAEAATRKQRITETESPYQELQGQRSDVYSDLNTQWRRKRKEKQSETSPKEFLTIYEDVKDLKTRRNHEQEQTFPGGGSTIYSMIQSQSSAPTSQEPAYTLYSLIQPSRKSGSRKRNHSPSFNSTIYEVIGKSQPKAQNPARLSRKELENFDVYSRPYYK

SEQ ID NO: 10016 - protein, 457 aa, -Artificial-Sequence
MALPVTALLLPLALLLHAARPDIQMTQSPSSLSASVGDRVTITCKASDHINNWLAWYQQKPGQAPKLLIYGATTLETGVPSRFSGSGSGTDYTLTISSLQPEDFATYYCQQSWNTPWTFGQGTKLEIKRGGGGSGGGGSGGGGSQVQLQQPGAELVKPGASVKMSCKASGYAFSSYWINWMKQKPGQGLEWIGQIYPGDGDTNYNGKFKGRATLTADTSSSTAYMQLSSLTSEDSAVYFCARSITTVVGCAMDYWGQGTSVTVSSTRTTPGERSSLPAFYPGTSGSCSGCGSLSLPLLAGLVAADAVASLLIVGAVFLCARPRRSPAQEDGKVYINMPGRGSSRRVKFSRSADAPAYQQGQNQLYNELNLGRREEYDVLDKRRGRDPEMGGKPQRRKNPQEGLYNELQKDKMAEAYSEIGMKGERRRGKGHDGLYQGLSTATKDTYDALHMQALPPR

SEQ ID NO: 10017 - protein, 461 aa, -Artificial-Sequence
MALPVTALLLPLALLLHAARPDIQMTQSPSSLSASVGDRVTITCKASDHINNWLAWYQQKPGQAPKLLIYGATTLETGVPSRFSGSGSGTDYTLTISSLQPEDFATYYCQQSWNTPWTFGQGTKLEIKRGGGGSGGGGSGGGGSQVQLQQPGAELVKPGASVKMSCKASGYAFSSYWINWMKQKPGQGLEWIGQIYPGDGDTNYNGKFKGRATLTADTSSSTAYMQLSSLTSEDSAVYFCARSITTVVGCAMDYWGQGTSVTVSSTRQAQSDCSCSTVSPGVLAGIVMGDLVLTVLIALAVYFLGRLVPRGRGAAEAATRKQRITETESPYQELQGQRSDVYSDLNTQRVKFSRSADAPAYQQGQNQLYNELNLGRREEYDVLDKRRGRDPEMGGKPQRRKNPQEGLYNELQKDKMAEAYSEIGMKGERRRGKGHDGLYQGLSTATKDTYDALHMQALPPR

SEQ ID NO: 10018 - protein, 437 aa, -Artificial-Sequence; identical to SEQ ID NO: 9932

SEQ ID NO: 10019 - protein, 479 aa, -Artificial-Sequence; identical to SEQ ID NO: 9933

SEQ ID NO: 10020 - protein, 478 aa, -Artificial-Sequence; identical to SEQ ID NO: 9934

SEQ ID NO: 10021 - protein, 473 aa, -Artificial-Sequence; identical to SEQ ID NO: 9935

SEQ ID NO: 10022 - protein, 557 aa, -Artificial-Sequence; identical to SEQ ID NO: 9936

SEQ ID NO: 10023 - protein, 437 aa, -Artificial-Sequence; identical to SEQ ID NO: 9937

SEQ ID NO: 10024 - protein, 437 aa, -Artificial-Sequence; identical to SEQ ID NO: 9938

SEQ ID NO: 10025 - protein, 368 aa, -Artificial-Sequence; identical to SEQ ID NO: 9939

SEQ ID NO: 10026 - protein, 410 aa, -Artificial-Sequence; identical to SEQ ID NO: 9940

SEQ ID NO: 10027 - protein, 409 aa, -Artificial-Sequence; identical to SEQ ID NO: 9941

SEQ ID NO: 10028 - protein, 404 aa, -Artificial-Sequence; identical to SEQ ID NO: 9942

SEQ ID NO: 10029 - protein, 488 aa, -Artificial-Sequence; identical to SEQ ID NO: 9943

SEQ ID NO: 10030 - protein, 404 aa, -Artificial-Sequence; identical to SEQ ID NO: 9944

SEQ ID NO: 10031 - protein, 403 aa, -Artificial-Sequence; identical to SEQ ID NO: 9945

SEQ ID NO: 10032 - protein, 398 aa, -Artificial-Sequence; identical to SEQ ID NO: 9946

SEQ ID NO: 10033 - protein, 482 aa, -Artificial-Sequence; identical to SEQ ID NO: 9947

SEQ ID NO: 10034 - protein, 362 aa, -Artificial-Sequence; identical to SEQ ID NO: 9948

SEQ ID NO: 10035 - protein, 380 aa, -Artificial-Sequence; identical to SEQ ID NO: 9949

SEQ ID NO: 10036 - protein, 380 aa, -Artificial-Sequence; identical to SEQ ID NO: 9950

SEQ ID NO: 10037 - protein, 422 aa, -Artificial-Sequence; identical to SEQ ID NO: 9951

SEQ ID NO: 10038 - protein, 421 aa, -Artificial-Sequence; identical to SEQ ID NO: 9952

SEQ ID NO: 10039 - protein, 416 aa, -Artificial-Sequence; identical to SEQ ID NO: 9953

SEQ ID NO: 10040 - protein, 500 aa, -Artificial-Sequence; identical to SEQ ID NO: 9954

SEQ ID NO: 10041 - protein, 484 aa, -Artificial-Sequence; identical to SEQ ID NO: 9955

SEQ ID NO: 10042 - protein, 488 aa, -Artificial-Sequence; identical to SEQ ID NO: 9956

SEQ ID NO: 10043 - protein, 512 aa, -Artificial-Sequence; identical to SEQ ID NO: 5151

SEQ ID NO: 10044 - protein, 503 aa, -Artificial-Sequence; identical to SEQ ID NO: 5152

SEQ ID NO: 10045 - protein, 505 aa, -Artificial-Sequence; identical to SEQ ID NO: 5153

SEQ ID NO: 10046 - protein, 505 aa, -Artificial-Sequence; identical to SEQ ID NO: 5154

SEQ ID NO: 10047 - protein, 510 aa, -Artificial-Sequence; identical to SEQ ID NO: 5155

SEQ ID NO: 10048 - protein, 505 aa, -Artificial-Sequence; identical to SEQ ID NO: 5156

SEQ ID NO: 10049 - protein, 500 aa, -Artificial-Sequence; identical to SEQ ID NO: 5157

SEQ ID NO: 10050 - protein, 504 aa, -Artificial-Sequence; identical to SEQ ID NO: 5158

SEQ ID NO: 10051 - protein, 503 aa, -Artificial-Sequence; identical to SEQ ID NO: 5159

SEQ ID NO: 10052 - protein, 503 aa, -Artificial-Sequence; identical to SEQ ID NO: 5160

SEQ ID NO: 10053 - protein, 505 aa, -Artificial-Sequence; identical to SEQ ID NO: 5161

SEQ ID NO: 10054 - protein, 508 aa, -Artificial-Sequence; identical to SEQ ID NO: 5162

SEQ ID NO: 10055 - protein, 509 aa, -Artificial-Sequence; identical to SEQ ID NO: 5163

SEQ ID NO: 10056 - protein, 503 aa, -Artificial-Sequence; identical to SEQ ID NO: 5164

SEQ ID NO: 10057 - protein, 500 aa, -Artificial-Sequence; identical to SEQ ID NO: 5165

SEQ ID NO: 10058 - protein, 504 aa, -Artificial-Sequence; identical to SEQ ID NO: 5166

SEQ ID NO: 10059 - protein, 502 aa, -Artificial-Sequence; identical to SEQ ID NO: 5167

SEQ ID NO: 10060 - protein, 508 aa, -Artificial-Sequence; identical to SEQ ID NO: 5168

SEQ ID NO: 10061 - protein, 498 aa, -Artificial-Sequence; identical to SEQ ID NO: 5169

SEQ ID NO: 10062 - protein, 507 aa, -Artificial-Sequence; identical to SEQ ID NO: 5170

SEQ ID NO: 10063 - protein, 511 aa, -Artificial-Sequence; identical to SEQ ID NO: 5171

SEQ ID NO: 10064 - protein, 511 aa, -Artificial-Sequence; identical to SEQ ID NO: 5172

SEQ ID NO: 10065 - protein, 506 aa, -Artificial-Sequence; identical to SEQ ID NO: 5173

SEQ ID NO: 10066 - protein, 506 aa, -Artificial-Sequence; identical to SEQ ID NO: 5173

SEQ ID NO: 10067 - protein, 506 aa, -Artificial-Sequence; identical to SEQ ID NO: 5175

SEQ ID NO: 10068 - protein, 502 aa, -Artificial-Sequence; identical to SEQ ID NO: 5176

SEQ ID NO: 10069 - protein, 505 aa, -Artificial-Sequence; identical to SEQ ID NO: 5177

SEQ ID NO: 10070 - protein, 513 aa, -Artificial-Sequence; identical to SEQ ID NO: 5178

SEQ ID NO: 10071 - protein, 510 aa, -Artificial-Sequence; identical to SEQ ID NO: 5179

SEQ ID NO: 10072 - protein, 500 aa, -Artificial-Sequence; identical to SEQ ID NO: 5180

SEQ ID NO: 10073 - protein, 503 aa, -Artificial-Sequence; identical to SEQ ID NO: 5181

SEQ ID NO: 10074 - protein, 495 aa, -Artificial-Sequence; identical to SEQ ID NO: 5182

SEQ ID NO: 10075 - protein, 500 aa, -Artificial-Sequence; identical to SEQ ID NO: 5183

SEQ ID NO: 10076 - protein, 503 aa, -Artificial-Sequence; identical to SEQ ID NO: 5184

SEQ ID NO: 10077 - protein, 508 aa, -Artificial-Sequence; identical to SEQ ID NO: 5185

SEQ ID NO: 10078 - protein, 502 aa, -Artificial-Sequence; identical to SEQ ID NO: 5186

SEQ ID NO: 10079 - protein, 503 aa, -Artificial-Sequence; identical to SEQ ID NO: 5187

SEQ ID NO: 10080 - protein, 509 aa, -Artificial-Sequence; identical to SEQ ID NO: 5188

SEQ ID NO: 10081 - protein, 509 aa, -Artificial-Sequence; identical to SEQ ID NO: 5189

SEQ ID NO: 10082 - protein, 507 aa, -Artificial-Sequence; identical to SEQ ID NO: 5190

SEQ ID NO: 10083 - protein, 502 aa, -Artificial-Sequence; identical to SEQ ID NO: 5191

SEQ ID NO: 10084 - protein, 502 aa, -Artificial-Sequence; identical to SEQ ID NO: 5192

SEQ ID NO: 10085 - protein, 502 aa, -Artificial-Sequence; identical to SEQ ID NO: 5193

SEQ ID NO: 10086 - protein, 510 aa, -Artificial-Sequence; identical to SEQ ID NO: 5194

SEQ ID NO: 10087 - protein, 509 aa, -Artificial-Sequence; identical to SEQ ID NO: 5195

SEQ ID NO: 10088 - protein, 507 aa, -Artificial-Sequence; identical to SEQ ID NO: 5196

SEQ ID NO: 10089 - protein, 501 aa, -Artificial-Sequence; identical to SEQ ID NO: 5197

SEQ ID NO: 10090 - protein, 506 aa, -Artificial-Sequence; identical to SEQ ID NO: 5198

SEQ ID NO: 10091 - protein, 502 aa, -Artificial-Sequence; identical to SEQ ID NO: 5199

SEQ ID NO: 10092 - protein, 500 aa, -Artificial-Sequence; identical to SEQ ID NO: 5200

SEQ ID NO: 10093 - protein, 503 aa, -Artificial-Sequence; identical to SEQ ID NO: 5201

SEQ ID NO: 10094 - protein, 505 aa, -Artificial-Sequence; identical to SEQ ID NO: 5202

SEQ ID NO: 10095 - protein, 504 aa, -Artificial-Sequence; identical to SEQ ID NO: 5203

SEQ ID NO: 10096 - protein, 503 aa, -Artificial-Sequence; identical to SEQ ID NO: 5204

SEQ ID NO: 10097 - protein, 504 aa, -Artificial-Sequence; identical to SEQ ID NO: 5205

SEQ ID NO: 10098 - protein, 503 aa, -Artificial-Sequence; identical to SEQ ID NO: 5206

SEQ ID NO: 10099 - protein, 516 aa, -Artificial-Sequence; identical to SEQ ID NO: 5207

SEQ ID NO: 10100 - protein, 511 aa, -Artificial-Sequence; identical to SEQ ID NO: 5208

SEQ ID NO: 10101 - protein, 491 aa, -Artificial-Sequence; identical to SEQ ID NO: 5209

SEQ ID NO: 10102 - protein, 501 aa, -Artificial-Sequence; identical to SEQ ID NO: 5210

SEQ ID NO: 10103 - protein, 505 aa, -Artificial-Sequence; identical to SEQ ID NO: 5211

SEQ ID NO: 10104 - protein, 501 aa, -Artificial-Sequence; identical to SEQ ID NO: 5212

SEQ ID NO: 10105 - protein, 501 aa, -Artificial-Sequence; identical to SEQ ID NO: 5213

SEQ ID NO: 10106 - protein, 502 aa, -Artificial-Sequence; identical to SEQ ID NO: 5214

SEQ ID NO: 10107 - protein, 502 aa, -Artificial-Sequence; identical to SEQ ID NO: 5215

SEQ ID NO: 10108 - protein, 510 aa, -Artificial-Sequence; identical to SEQ ID NO: 5216

SEQ ID NO: 10109 - protein, 502 aa, -Artificial-Sequence; identical to SEQ ID NO: 5217

SEQ ID NO: 10110 - protein, 501 aa, -Artificial-Sequence; identical to SEQ ID NO: 5218

SEQ ID NO: 10111 - protein, 501 aa, -Artificial-Sequence; identical to SEQ ID NO: 5219

SEQ ID NO: 10112 - protein, 503 aa, -Artificial-Sequence; identical to SEQ ID NO: 5220

SEQ ID NO: 10113 - protein, 504 aa, -Artificial-Sequence; identical to SEQ ID NO: 5221

SEQ ID NO: 10114 - protein, 513 aa, -Artificial-Sequence; identical to SEQ ID NO: 5222

SEQ ID NO: 10115 - protein, 504 aa, -Artificial-Sequence; identical to SEQ ID NO: 5223

SEQ ID NO: 10116 - protein, 507 aa, -Artificial-Sequence; identical to SEQ ID NO: 5224

SEQ ID NO: 10117 - protein, 503 aa, -Artificial-Sequence; identical to SEQ ID NO: 5225

SEQ ID NO: 10118 - protein, 500 aa, -Artificial-Sequence; identical to SEQ ID NO: 5226

SEQ ID NO: 10119 - protein, 505 aa, -Artificial-Sequence; identical to SEQ ID NO: 5227

SEQ ID NO: 10120 - protein, 504 aa, -Artificial-Sequence; identical to SEQ ID NO: 5228

SEQ ID NO: 10121 - protein, 507 aa, -Artificial-Sequence; identical to SEQ ID NO: 5229

SEQ ID NO: 10122 - protein, 501 aa, -Artificial-Sequence; identical to SEQ ID NO: 5230

SEQ ID NO: 10123 - protein, 506 aa, -Artificial-Sequence; identical to SEQ ID NO: 5231

SEQ ID NO: 10124 - protein, 505 aa, -Artificial-Sequence; identical to SEQ ID NO: 5232

SEQ ID NO: 10125 - protein, 503 aa, -Artificial-Sequence; identical to SEQ ID NO: 5233

SEQ ID NO: 10126 - protein, 502 aa, -Artificial-Sequence; identical to SEQ ID NO: 5234

SEQ ID NO: 10127 - protein, 498 aa, -Artificial-Sequence; identical to SEQ ID NO: 5235

SEQ ID NO: 10128 - protein, 505 aa, -Artificial-Sequence; identical to SEQ ID NO: 5236

SEQ ID NO: 10129 - protein, 501 aa, -Artificial-Sequence; identical to SEQ ID NO: 5237

SEQ ID NO: 10130 - protein, 502 aa, -Artificial-Sequence; identical to SEQ ID NO: 5238

SEQ ID NO: 10131 - protein, 508 aa, -Artificial-Sequence; identical to SEQ ID NO: 5239

SEQ ID NO: 10132 - protein, 510 aa, -Artificial-Sequence; identical to SEQ ID NO: 5240

SEQ ID NO: 10133 - protein, 515 aa, -Artificial-Sequence; identical to SEQ ID NO: 5241

SEQ ID NO: 10134 - protein, 515 aa, -Artificial-Sequence; identical to SEQ ID NO: 5242

SEQ ID NO: 10135 - protein, 504 aa, -Artificial-Sequence; identical to SEQ ID NO: 5243

SEQ ID NO: 10136 - protein, 505 aa, -Artificial-Sequence; identical to SEQ ID NO: 5244

SEQ ID NO: 10137 - protein, 509 aa, -Artificial-Sequence; identical to SEQ ID NO: 5245

SEQ ID NO: 10138 - protein, 509 aa, -Artificial-Sequence; identical to SEQ ID NO: 5246

SEQ ID NO: 10139 - protein, 499 aa, -Artificial-Sequence; identical to SEQ ID NO: 5247

SEQ ID NO: 10140 - protein, 501 aa, -Artificial-Sequence; identical to SEQ ID NO: 5248

SEQ ID NO: 10141 - protein, 510 aa, -Artificial-Sequence; identical to SEQ ID NO: 5249

SEQ ID NO: 10142 - protein, 514 aa, -Artificial-Sequence; identical to SEQ ID NO: 5250

SEQ ID NO: 10143 - protein, 510 aa, -Artificial-Sequence; identical to SEQ ID NO: 5251

SEQ ID NO: 10144 - protein, 510 aa, -Artificial-Sequence; identical to SEQ ID NO: 5251

SEQ ID NO: 10145 - protein, 528 aa, -Artificial-Sequence; identical to SEQ ID NO: 5253

SEQ ID NO: 10146 - protein, 505 aa, -Artificial-Sequence; identical to SEQ ID NO: 5254

SEQ ID NO: 10147 - protein, 507 aa, -Artificial-Sequence; identical to SEQ ID NO: 5255

SEQ ID NO: 10148 - protein, 506 aa, -Artificial-Sequence; identical to SEQ ID NO: 5256

SEQ ID NO: 10149 - protein, 500 aa, -Artificial-Sequence; identical to SEQ ID NO: 5257

SEQ ID NO: 10150 - protein, 502 aa, -Artificial-Sequence; identical to SEQ ID NO: 5258

SEQ ID NO: 10151 - protein, 503 aa, -Artificial-Sequence; identical to SEQ ID NO: 5259

SEQ ID NO: 10152 - protein, 509 aa, -Artificial-Sequence; identical to SEQ ID NO: 5260

SEQ ID NO: 10153 - protein, 507 aa, -Artificial-Sequence; identical to SEQ ID NO: 5261

SEQ ID NO: 10154 - protein, 507 aa, -Artificial-Sequence; identical to SEQ ID NO: 5262

SEQ ID NO: 10155 - protein, 516 aa, -Artificial-Sequence; identical to SEQ ID NO: 5263

SEQ ID NO: 10156 - protein, 512 aa, -Artificial-Sequence; identical to SEQ ID NO: 5264

SEQ ID NO: 10157 - protein, 503 aa, -Artificial-Sequence; identical to SEQ ID NO: 5265

SEQ ID NO: 10158 - protein, 505 aa, -Artificial-Sequence; identical to SEQ ID NO: 5266

SEQ ID NO: 10159 - protein, 507 aa, -Artificial-Sequence; identical to SEQ ID NO: 5267

SEQ ID NO: 10160 - protein, 514 aa, -Artificial-Sequence; identical to SEQ ID NO: 5268

SEQ ID NO: 10161 - protein, 514 aa, -Artificial-Sequence; identical to SEQ ID NO: 5269

SEQ ID NO: 10162 - protein, 507 aa, -Artificial-Sequence; identical to SEQ ID NO: 5270

SEQ ID NO: 10163 - protein, 505 aa, -Artificial-Sequence; identical to SEQ ID NO: 5244

SEQ ID NO: 10164 - protein, 505 aa, -Artificial-Sequence; identical to SEQ ID NO: 5153

SEQ ID NO: 10165 - protein, 501 aa, -Artificial-Sequence; identical to SEQ ID NO: 5273

SEQ ID NO: 10166 - protein, 506 aa, -Artificial-Sequence; identical to SEQ ID NO: 5274

SEQ ID NO: 10167 - protein, 515 aa, -Artificial-Sequence; identical to SEQ ID NO: 5275

SEQ ID NO: 10168 - protein, 513 aa, -Artificial-Sequence; identical to SEQ ID NO: 5276

SEQ ID NO: 10169 - protein, 515 aa, -Artificial-Sequence; identical to SEQ ID NO: 5277

SEQ ID NO: 10170 - protein, 514 aa, -Artificial-Sequence; identical to SEQ ID NO: 5278

SEQ ID NO: 10171 - protein, 505 aa, -Artificial-Sequence; identical to SEQ ID NO: 5279

SEQ ID NO: 10172 - protein, 501 aa, -Artificial-Sequence; identical to SEQ ID NO: 5280

SEQ ID NO: 10173 - protein, 506 aa, -Artificial-Sequence; identical to SEQ ID NO: 5281

SEQ ID NO: 10174 - protein, 504 aa, -Artificial-Sequence; identical to SEQ ID NO: 5282

SEQ ID NO: 10175 - protein, 506 aa, -Artificial-Sequence; identical to SEQ ID NO: 5283

SEQ ID NO: 10176 - protein, 516 aa, -Artificial-Sequence; identical to SEQ ID NO: 5284

SEQ ID NO: 10177 - protein, 509 aa, -Artificial-Sequence; identical to SEQ ID NO: 5285

SEQ ID NO: 10178 - protein, 501 aa, -Artificial-Sequence; identical to SEQ ID NO: 5286

SEQ ID NO: 10179 - protein, 508 aa, -Artificial-Sequence; identical to SEQ ID NO: 5287

SEQ ID NO: 10180 - protein, 501 aa, -Artificial-Sequence; identical to SEQ ID NO: 5288

SEQ ID NO: 10181 - protein, 509 aa, -Artificial-Sequence; identical to SEQ ID NO: 5289

SEQ ID NO: 10182 - protein, 504 aa, -Artificial-Sequence; identical to SEQ ID NO: 5290

SEQ ID NO: 10183 - protein, 508 aa, -Artificial-Sequence; identical to SEQ ID NO: 5291

SEQ ID NO: 10184 - protein, 506 aa, -Artificial-Sequence; identical to SEQ ID NO: 5292

SEQ ID NO: 10185 - protein, 511 aa, -Artificial-Sequence; identical to SEQ ID NO: 5293

SEQ ID NO: 10186 - protein, 505 aa, -Artificial-Sequence; identical to SEQ ID NO: 5294

SEQ ID NO: 10187 - protein, 506 aa, -Artificial-Sequence; identical to SEQ ID NO: 5295

SEQ ID NO: 10188 - protein, 509 aa, -Artificial-Sequence; identical to SEQ ID NO: 5296

SEQ ID NO: 10189 - protein, 501 aa, -Artificial-Sequence; identical to SEQ ID NO: 5297

SEQ ID NO: 10190 - protein, 504 aa, -Artificial-Sequence; identical to SEQ ID NO: 5298

SEQ ID NO: 10191 - protein, 501 aa, -Artificial-Sequence; identical to SEQ ID NO: 5299

SEQ ID NO: 10192 - protein, 508 aa, -Artificial-Sequence; identical to SEQ ID NO: 5300

SEQ ID NO: 10193 - protein, 498 aa, -Artificial-Sequence; identical to SEQ ID NO: 5301

SEQ ID NO: 10194 - protein, 498 aa, -Artificial-Sequence; identical to SEQ ID NO: 5302

SEQ ID NO: 10195 - protein, 502 aa, -Artificial-Sequence; identical to SEQ ID NO: 5303

SEQ ID NO: 10196 - protein, 505 aa, -Artificial-Sequence; identical to SEQ ID NO: 5304

SEQ ID NO: 10197 - protein, 504 aa, -Artificial-Sequence; identical to SEQ ID NO: 5305

SEQ ID NO: 10198 - protein, 507 aa, -Artificial-Sequence; identical to SEQ ID NO: 5306

SEQ ID NO: 10199 - protein, 507 aa, -Artificial-Sequence; identical to SEQ ID NO: 5307

SEQ ID NO: 10200 - protein, 502 aa, -Artificial-Sequence; identical to SEQ ID NO: 5308

SEQ ID NO: 10201 - protein, 505 aa, -Artificial-Sequence; identical to SEQ ID NO: 5309

SEQ ID NO: 10202 - protein, 505 aa, -Artificial-Sequence; identical to SEQ ID NO: 5310

SEQ ID NO: 10203 - protein, 500 aa, -Artificial-Sequence; identical to SEQ ID NO: 5311

SEQ ID NO: 10204 - protein, 500 aa, -Artificial-Sequence; identical to SEQ ID NO: 5312

SEQ ID NO: 10205 - protein, 512 aa, -Artificial-Sequence; identical to SEQ ID NO: 5313

SEQ ID NO: 10206 - protein, 505 aa, -Artificial-Sequence; identical to SEQ ID NO: 5314

SEQ ID NO: 10207 - protein, 502 aa, -Artificial-Sequence; identical to SEQ ID NO: 5315

SEQ ID NO: 10208 - protein, 511 aa, -Artificial-Sequence; identical to SEQ ID NO: 5316

SEQ ID NO: 10209 - protein, 498 aa, -Artificial-Sequence; identical to SEQ ID NO: 5317

SEQ ID NO: 10210 - protein, 501 aa, -Artificial-Sequence; identical to SEQ ID NO: 5318

SEQ ID NO: 10211 - protein, 506 aa, -Artificial-Sequence; identical to SEQ ID NO: 5319

SEQ ID NO: 10212 - protein, 505 aa, -Artificial-Sequence; identical to SEQ ID NO: 5320

SEQ ID NO: 10213 - protein, 513 aa, -Artificial-Sequence; identical to SEQ ID NO: 5321

SEQ ID NO: 10214 - protein, 507 aa, -Artificial-Sequence; identical to SEQ ID NO: 5322

SEQ ID NO: 10215 - protein, 515 aa, -Artificial-Sequence; identical to SEQ ID NO: 5323

SEQ ID NO: 10216 - protein, 508 aa, -Artificial-Sequence; identical to SEQ ID NO: 5324

SEQ ID NO: 10217 - protein, 511 aa, -Artificial-Sequence; identical to SEQ ID NO: 5325

SEQ ID NO: 10218 - protein, 511 aa, -Artificial-Sequence; identical to SEQ ID NO: 5326

SEQ ID NO: 10219 - protein, 517 aa, -Artificial-Sequence; identical to SEQ ID NO: 5327

SEQ ID NO: 10220 - protein, 502 aa, -Artificial-Sequence; identical to SEQ ID NO: 5328

SEQ ID NO: 10221 - protein, 509 aa, -Artificial-Sequence; identical to SEQ ID NO: 5329

SEQ ID NO: 10222 - protein, 373 aa, -Artificial-Sequence; identical to SEQ ID NO: 5330

SEQ ID NO: 10223 - protein, 368 aa, -Artificial-Sequence; identical to SEQ ID NO: 5331

SEQ ID NO: 10224 - protein, 369 aa, -Artificial-Sequence; identical to SEQ ID NO: 5332

SEQ ID NO: 10225 - protein, 369 aa, -Artificial-Sequence; identical to SEQ ID NO: 5333

SEQ ID NO: 10226 - protein, 369 aa, -Artificial-Sequence; identical to SEQ ID NO: 5334

SEQ ID NO: 10227 - protein, 369 aa, -Artificial-Sequence; identical to SEQ ID NO: 5335

SEQ ID NO: 10228 - protein, 369 aa, -Artificial-Sequence; identical to SEQ ID NO: 5336

SEQ ID NO: 10229 - protein, 373 aa, -Artificial-Sequence; identical to SEQ ID NO: 5337

SEQ ID NO: 10230 - protein, 373 aa, -Artificial-Sequence; identical to SEQ ID NO: 5338

SEQ ID NO: 10231 - protein, 370 aa, -Artificial-Sequence; identical to SEQ ID NO: 5339

SEQ ID NO: 10232 - protein, 506 aa, -Artificial-Sequence
MALPVTALLLPLALLLHAARPSYVLTQPPSVSVAPGQTARITCGGNNIGSKSVHWYQQPPGQAPVVVVYDDSDRPSGIPERFSGSNSGNTATLTISRVEAGDEAVYYCQVWDSSSDHVVFGGGTKLTVLGGGGSGGGGSGGGGSQLQLQESGPGLVKPSETLSLTCTVSGGSISSSSYFWGWIRQPPGKGLEWIGSIYYSGITYYNPSLKSRVTISVDTSKNQFSLKLSSVTAADTAVYYCARHDGAVAGLFDYWGQGTLVTVSSATRGMRTEDLPKAVVFLEPQWYRVLEKDSVTLKCQGAYSPEDNSTQWFHNESLISSQASSYFIDAATVDDSGEYRCQTNLSTLSDPVQLEVHIGWLLLQAPRWVFKEEDPIHLRCHSWKNTALHKVTYLQNGKGRKYFHHNSDFYIPKATLKDSGSYFCRGLVGSKNVSSETVNITITQGLAVPTISSFFPPGYQVSFCLVMVLLFAVDTGLYFSVKTNIRSSTRDWKDHKFKWRKDPQDK

SEQ ID NO: 10233 - protein, 506 aa, -Artificial-Sequence
MALPVTALLLPLALLLHAARPSYVLTQPPSVSVAPGQTARITCGGNNIGSKSVHWYQQPPGQAPVVVVYDDSDRPSGIPERFSGSNSGNTATLTISRVEAGDEAVYYCQVWDSSSDHVVFGGGTKLTVLGGGGSGGGGSGGGGSQLQLQESGPGLVKPSETLSLTCTVSGGSISSGSYIWGWIRQPPGKGLEWIGSIYYSGITYYNPSLKSRVTISVDTSKNQFSLKLSSVTAADTAVYYCARHDGAVAGLFDYWGQGTLVTVSSATRGMRTEDLPKAVVFLEPQWYRVLEKDSVTLKCQGAYSPEDNSTQWFHNESLISSQASSYFIDAATVDDSGEYRCQTNLSTLSDPVQLEVHIGWLLLQAPRWVFKEEDPIHLRCHSWKNTALHKVTYLQNGKGRKYFHHNSDFYIPKATLKDSGSYFCRGLVGSKNVSSETVNITITQGLAVPTISSFFPPGYQVSFCLVMVLLFAVDTGLYFSVKTNIRSSTRDWKDHKFKWRKDPQDK

SEQ ID NO: 10234 - protein, 506 aa, -Artificial-Sequence
MALPVTALLLPLALLLHAARPSYVLTQPPSVSVAPGQTARITCGGNNIGSKSVHWYQQPPGQAPVVVVYDDSDRPSGIPERFSGSNSGNTATLTISRVEAGDEAVYYCQVWDSSSDHVVFGGGTKLTVLGGGGSGGGGSGGGGSQLQLQESGPGLVKPSETLSLTCTVSGGSISSGSYFWGWIRQPPGKGLEWIGSIYYSGITYYNPSLKSRVTISVDTSKNQFSLKLSSVTAADTAVYYCARHDGAMAGLFDYWGQGTLVTVSSATRGMRTEDLPKAVVFLEPQWYRVLEKDSVTLKCQGAYSPEDNSTQWFHNESLISSQASSYFIDAATVDDSGEYRCQTNLSTLSDPVQLEVHIGWLLLQAPRWVFKEEDPIHLRCHSWKNTALHKVTYLQNGKGRKYFHHNSDFYIPKATLKDSGSYFCRGLVGSKNVSSETVNITITQGLAVPTISSFFPPGYQVSFCLVMVLLFAVDTGLYFSVKTNIRSSTRDWKDHKFKWRKDPQDK

SEQ ID NO: 10235 - protein, 506 aa, -Artificial-Sequence
MALPVTALLLPLALLLHAARPSYVLTQPPSVSVAPGQTARITCGGNNIGSKSVHWYQQPPGQAPVVVVYDDSDRPSGIPERFSGSNSGNTATLTISRVEAGDEAVYYCQVWDSSSDHVVFGGGTKLTVLGGGGSGGGGSGGGGSQLQLQESGPGLVKPSETLSLTCTVSGGSISSGSYFWGWIRQPPGKGLEWIGSIYYSGSTYYNPSLKSRVTISVDTSKNQFSLKLSSVTAADTAVYYCARHDGAVAGLFDYWGQGTLVTVSSATRGMRTEDLPKAVVFLEPQWYRVLEKDSVTLKCQGAYSPEDNSTQWFHNESLISSQASSYFIDAATVDDSGEYRCQTNLSTLSDPVQLEVHIGWLLLQAPRWVFKEEDPIHLRCHSWKNTALHKVTYLQNGKGRKYFHHNSDFYIPKATLKDSGSYFCRGLVGSKNVSSETVNITITQGLAVPTISSFFPPGYQVSFCLVMVLLFAVDTGLYFSVKTNIRSSTRDWKDHKFKWRKDPQDK

SEQ ID NO: 10236 - protein, 506 aa, -Artificial-Sequence
MALPVTALLLPLALLLHAARPSYVLTQPPSVSVAPGQTARITCGGNNIGSKSVHWYQQPPGQAPVVVVYDDSDRPSGIPERFSGSNSGNTATLTISRVEAGDEAVYYCQVWDSSSDHVVFGGGTKLTVLGGGGSGGGGSGGGGSQLQLQESGPGLVKPSETLSLTCTVSGGSISSGSYFWGWIRQPPGKGLEWIGSIYYSGISYYNPSLKSRVTISVDTSKNQFSLKLSSVTAADTAVYYCARHDGAVAGLFDYWGQGTLVTVSSATRGMRTEDLPKAVVFLEPQWYRVLEKDSVTLKCQGAYSPEDNSTQWFHNESLISSQASSYFIDAATVDDSGEYRCQTNLSTLSDPVQLEVHIGWLLLQAPRWVFKEEDPIHLRCHSWKNTALHKVTYLQNGKGRKYFHHNSDFYIPKATLKDSGSYFCRGLVGSKNVSSETVNITITQGLAVPTISSFFPPGYQVSFCLVMVLLFAVDTGLYFSVKTNIRSSTRDWKDHKFKWRKDPQDK

SEQ ID NO: 10237 - protein, 506 aa, -Artificial-Sequence
MALPVTALLLPLALLLHAARPSYVLTQPPSVSVAPGQTARITCGGNNIGSKSVHWYQQPPGQAPVVVVYDDSDRPSGIPERFSGSNSGNTATLTISRVEAGDEAVYYCQVWDSSSDHVVFGGGTKLTVLGGGGSGGGGSGGGGSQLQLQESGPGLVKPSETLSLTCTVSGGSISSGSYFWGWIRQPPGKGLEWIGSIYYSGITYYNPGLKSRVTISVDTSKNQFSLKLSSVTAADTAVYYCARHDGAVAGLFDYWGQGTLVTVSSATRGMRTEDLPKAVVFLEPQWYRVLEKDSVTLKCQGAYSPEDNSTQWFHNESLISSQASSYFIDAATVDDSGEYRCQTNLSTLSDPVQLEVHIGWLLLQAPRWVFKEEDPIHLRCHSWKNTALHKVTYLQNGKGRKYFHHNSDFYIPKATLKDSGSYFCRGLVGSKNVSSETVNITITQGLAVPTISSFFPPGYQVSFCLVMVLLFAVDTGLYFSVKTNIRSSTRDWKDHKFKWRKDPQDK

SEQ ID NO: 10238 - protein, 506 aa, -Artificial-Sequence
MALPVTALLLPLALLLHAARPSYVLTQPPSVSVAPGQTARITCGGNNIGSKSVHWYQQPPGQAPVVVVYDDSDRPSGIPERFSGSNSGNTATLTISRVEAGDEAVYYCQVWDSSSDHVVFGGGTKLTVLGGGGSGGGGSGGGGSQLQLQESGPGLVKPSETLSLTCTVSGGSISSGSYFWGWIRQPPGKGLEWIGSIYYSGITYYNPTLKSRVTISVDTSKNQFSLKLSSVTAADTAVYYCARHDGAVAGLFDYWGQGTLVTVSSATRGMRTEDLPKAVVFLEPQWYRVLEKDSVTLKCQGAYSPEDNSTQWFHNESLISSQASSYFIDAATVDDSGEYRCQTNLSTLSDPVQLEVHIGWLLLQAPRWVFKEEDPIHLRCHSWKNTALHKVTYLQNGKGRKYFHHNSDFYIPKATLKDSGSYFCRGLVGSKNVSSETVNITITQGLAVPTISSFFPPGYQVSFCLVMVLLFAVDTGLYFSVKTNIRSSTRDWKDHKFKWRKDPQDK

SEQ ID NO: 10239 - protein, 506 aa, -Artificial-Sequence
MALPVTALLLPLALLLHAARPSYVLTQPPSVSVAPGQTARITCGGKNIGSKSVHWYQQPPGQAPVVVVYDDSDRPSGIPERFSGSNSGNTATLTISRVEAGDEAVYYCQVWDSSSDHVVFGGGTKLTVLGGGGSGGGGSGGGGSQLQLQESGPGLVKPSETLSLTCTVSGGSISSGSYFWGWIRQPPGKGLEWIGSIYYSGITYYNPSLKSRVTISVDTSKNQFSLKLSSVTAADTAVYYCARHDGAVAGLFDYWGQGTLVTVSSATRGMRTEDLPKAVVFLEPQWYRVLEKDSVTLKCQGAYSPEDNSTQWFHNESLISSQASSYFIDAATVDDSGEYRCQTNLSTLSDPVQLEVHIGWLLLQAPRWVFKEEDPIHLRCHSWKNTALHKVTYLQNGKGRKYFHHNSDFYIPKATLKDSGSYFCRGLVGSKNVSSETVNITITQGLAVPTISSFFPPGYQVSFCLVMVLLFAVDTGLYFSVKTNIRSSTRDWKDHKFKWRKDPQDK

SEQ ID NO: 10240 - protein, 506 aa, -Artificial-Sequence
MALPVTALLLPLALLLHAARPSYVLTQPPSVSVAPGQTARITCGGNNLGSKSVHWYQQPPGQAPVVVVYDDSDRPSGIPERFSGSNSGNTATLTISRVEAGDEAVYYCQVWDSSSDHVVFGGGTKLTVLGGGGSGGGGSGGGGSQLQLQESGPGLVKPSETLSLTCTVSGGSISSGSYFWGWIRQPPGKGLEWIGSIYYSGITYYNPSLKSRVTISVDTSKNQFSLKLSSVTAADTAVYYCARHDGAVAGLFDYWGQGTLVTVSSATRGMRTEDLPKAVVFLEPQWYRVLEKDSVTLKCQGAYSPEDNSTQWFHNESLISSQASSYFIDAATVDDSGEYRCQTNLSTLSDPVQLEVHIGWLLLQAPRWVFKEEDPIHLRCHSWKNTALHKVTYLQNGKGRKYFHHNSDFYIPKATLKDSGSYFCRGLVGSKNVSSETVNITITQGLAVPTISSFFPPGYQVSFCLVMVLLFAVDTGLYFSVKTNIRSSTRDWKDHKFKWRKDPQDK

SEQ ID NO: 10241 - protein, 506 aa, -Artificial-Sequence
MALPVTALLLPLALLLHAARPSYVLTQPPSVSVAPGQTARITCGGNNIGGKSVHWYQQPPGQAPVVVVYDDSDRPSGIPERFSGSNSGNTATLTISRVEAGDEAVYYCQVWDSSSDHVVFGGGTKLTVLGGGGSGGGGSGGGGSQLQLQESGPGLVKPSETLSLTCTVSGGSISSGSYFWGWIRQPPGKGLEWIGSIYYSGITYYNPSLKSRVTISVDTSKNQFSLKLSSVTAADTAVYYCARHDGAVAGLFDYWGQGTLVTVSSATRGMRTEDLPKAVVFLEPQWYRVLEKDSVTLKCQGAYSPEDNSTQWFHNESLISSQASSYFIDAATVDDSGEYRCQTNLSTLSDPVQLEVHIGWLLLQAPRWVFKEEDPIHLRCHSWKNTALHKVTYLQNGKGRKYFHHNSDFYIPKATLKDSGSYFCRGLVGSKNVSSETVNITITQGLAVPTISSFFPPGYQVSFCLVMVLLFAVDTGLYFSVKTNIRSSTRDWKDHKFKWRKDPQDK

SEQ ID NO: 10242 - protein, 506 aa, -Artificial-Sequence
MALPVTALLLPLALLLHAARPSYVLTQPPSVSVAPGQTARITCGGNNIGSKTVHWYQQPPGQAPVVVVYDDSDRPSGIPERFSGSNSGNTATLTISRVEAGDEAVYYCQVWDSSSDHVVFGGGTKLTVLGGGGSGGGGSGGGGSQLQLQESGPGLVKPSETLSLTCTVSGGSISSGSYFWGWIRQPPGKGLEWIGSIYYSGITYYNPSLKSRVTISVDTSKNQFSLKLSSVTAADTAVYYCARHDGAVAGLFDYWGQGTLVTVSSATRGMRTEDLPKAVVFLEPQWYRVLEKDSVTLKCQGAYSPEDNSTQWFHNESLISSQASSYFIDAATVDDSGEYRCQTNLSTLSDPVQLEVHIGWLLLQAPRWVFKEEDPIHLRCHSWKNTALHKVTYLQNGKGRKYFHHNSDFYIPKATLKDSGSYFCRGLVGSKNVSSETVNITITQGLAVPTISSFFPPGYQVSFCLVMVLLFAVDTGLYFSVKTNIRSSTRDWKDHKFKWRKDPQDK

SEQ ID NO: 10243 - protein, 506 aa, -Artificial-Sequence
MALPVTALLLPLALLLHAARPSYVLTQPPSVSVAPGQTARITCGGKNIGSKSVHWYQQPPGQAPVVVVYDDSDRPSGIPERFSGSNSGNTATLTISRVEAGDEAVYYCQVWDSSSDHVVFGGGTKLTVLGGGGSGGGGSGGGGSQLQLQESGPGLVKPSETLSLTCTVSGGSISSSSYFWGWIRQPPGKGLEWIGSIYYSGITYYNPSLKSRVTISVDTSKNQFSLKLSSVTAADTAVYYCARHDGAVAGLFDYWGQGTLVTVSSATRGMRTEDLPKAVVFLEPQWYRVLEKDSVTLKCQGAYSPEDNSTQWFHNESLISSQASSYFIDAATVDDSGEYRCQTNLSTLSDPVQLEVHIGWLLLQAPRWVFKEEDPIHLRCHSWKNTALHKVTYLQNGKGRKYFHHNSDFYIPKATLKDSGSYFCRGLVGSKNVSSETVNITITQGLAVPTISSFFPPGYQVSFCLVMVLLFAVDTGLYFSVKTNIRSSTRDWKDHKFKWRKDPQDK

SEQ ID NO: 10244 - protein, 506 aa, -Artificial-Sequence
MALPVTALLLPLALLLHAARPSYVLTQPPSVSVAPGQTARITCGGNNLGSKSVHWYQQPPGQAPVVVVYDDSDRPSGIPERFSGSNSGNTATLTISRVEAGDEAVYYCQVWDSSSDHVVFGGGTKLTVLGGGGSGGGGSGGGGSQLQLQESGPGLVKPSETLSLTCTVSGGSISSSSYFWGWIRQPPGKGLEWIGSIYYSGITYYNPSLKSRVTISVDTSKNQFSLKLSSVTAADTAVYYCARHDGAVAGLFDYWGQGTLVTVSSATRGMRTEDLPKAVVFLEPQWYRVLEKDSVTLKCQGAYSPEDNSTQWFHNESLISSQASSYFIDAATVDDSGEYRCQTNLSTLSDPVQLEVHIGWLLLQAPRWVFKEEDPIHLRCHSWKNTALHKVTYLQNGKGRKYFHHNSDFYIPKATLKDSGSYFCRGLVGSKNVSSETVNITITQGLAVPTISSFFPPGYQVSFCLVMVLLFAVDTGLYFSVKTNIRSSTRDWKDHKFKWRKDPQDK

SEQ ID NO: 10245 - protein, 506 aa, -Artificial-Sequence
MALPVTALLLPLALLLHAARPSYVLTQPPSVSVAPGQTARITCGGNNIGGKSVHWYQQPPGQAPVVVVYDDSDRPSGIPERFSGSNSGNTATLTISRVEAGDEAVYYCQVWDSSSDHVVFGGGTKLTVLGGGGSGGGGSGGGGSQLQLQESGPGLVKPSETLSLTCTVSGGSISSSSYFWGWIRQPPGKGLEWIGSIYYSGITYYNPSLKSRVTISVDTSKNQFSLKLSSVTAADTAVYYCARHDGAVAGLFDYWGQGTLVTVSSATRGMRTEDLPKAVVFLEPQWYRVLEKDSVTLKCQGAYSPEDNSTQWFHNESLISSQASSYFIDAATVDDSGEYRCQTNLSTLSDPVQLEVHIGWLLLQAPRWVFKEEDPIHLRCHSWKNTALHKVTYLQNGKGRKYFHHNSDFYIPKATLKDSGSYFCRGLVGSKNVSSETVNITITQGLAVPTISSFFPPGYQVSFCLVMVLLFAVDTGLYFSVKTNIRSSTRDWKDHKFKWRKDPQDK

SEQ ID NO: 10246 - protein, 503 aa, -Artificial-Sequence
MALPVTALLLPLALLLHAARPEIVLTQSPATLSLSPGERATLSCRASQSVSSYLAWYQQKPGQAPRLLIYDASNRATGIPARFSGSGSGTDFTLTISSLEPEDFAVYYCQQRSNWPLTFGQGTKVEIKGGGGSGGGGSGGGGSQVQLVQSGAEVKKPGSSVKVSCKASGGTFSTYAIHWVRQAPGQGLEWMGRIIPIEGRAYYAQKFQGRVTITADESTSTAYMELSSLRSEDTAVYYCARGRYSYRYWFDYWGQGTLVTVSSTRGMRTEDLPKAVVFLEPQWYRVLEKDSVTLKCQGAYSPEDNSTQWFHNESLISSQASSYFIDAATVDDSGEYRCQTNLSTLSDPVQLEVHIGWLLLQAPRWVFKEEDPIHLRCHSWKNTALHKVTYLQNGKGRKYFHHNSDFYIPKATLKDSGSYFCRGLVGSKNVSSETVNITITQGLAVPTISSFFPPGYQVSFCLVMVLLFAVDTGLYFSVKTNIRSSTRDWKDHKFKWRKDPQDK

SEQ ID NO: 10247 - protein, 511 aa, -Artificial-Sequence
MALPVTALLLPLALLLHAARPDIVMTQSPDSLAVSLGERATINCKSSQSVLYSSNNKNYLAWYQQKPGQPPKLLIYWASTRESGVPDRFSGSGSGTDFTLTISSLQAEDVAVYYCQQYYSTPLTFGQGTKVEIKGGGGSGGGGSGGGGSEVQLVQSGAEVKKPGESLKISCKGSGYSFTSYWIGWVRQMPGKGLEWMGIIYPGDSDTRYSPSFQGQVTISADKSISTAYLQWSSLKASDTAMYYCARDVGRWAPGGFLDYWGQGTLVTVSSTRGMRTEDLPKAVVFLEPQWYRVLEKDSVTLKCQGAYSPEDNSTQWFHNESLISSQASSYFIDAATVDDSGEYRCQTNLSTLSDPVQLEVHIGWLLLQAPRWVFKEEDPIHLRCHSWKNTALHKVTYLQNGKGRKYFHHNSDFYIPKATLKDSGSYFCRGLVGSKNVSSETVNITITQGLAVPTISSFFPPGYQVSFCLVMVLLFAVDTGLYFSVKTNIRSSTRDWKDHKFKWRKDPQDK

SEQ ID NO: 10248 - protein, 502 aa, -Artificial-Sequence
MALPVTALLLPLALLLHAARPDIQMTQSPSSLSASVGDRVTITCRASQSINKWLNWYQQKPGKAPKLLIYAASSLQSGVPSRFSGSGSGTDFTLTISSLQPEDFATYYCQQDYNFPYTFGQGTKVEIKRGGGGSGGGGSGGGGSQVQLVQSGAEVKKPGSSVKVSCKASGGTFSSYGISWVRQAPGQGLEWMGWISAIFGTANYAQKFQGRVTITADESTSTAYMELSSLRSEDTAVYYCARGVASWYLDYWGQGTLVTVSSTRGMRTEDLPKAVVFLEPQWYRVLEKDSVTLKCQGAYSPEDNSTQWFHNESLISSQASSYFIDAATVDDSGEYRCQTNLSTLSDPVQLEVHIGWLLLQAPRWVFKEEDPIHLRCHSWKNTALHKVTYLQNGKGRKYFHHNSDFYIPKATLKDSGSYFCRGLVGSKNVSSETVNITITQGLAVPTISSFFPPGYQVSFCLVMVLLFAVDTGLYFSVKTNIRSSTRDWKDHKFKWRKDPQDK

SEQ ID NO: 10249 - protein, 502 aa, -Artificial-Sequence
MALPVTALLLPLALLLHAARPQIVLSQSPAILSASPGEKVTMTCRASSSVSYIHWFQQKPGSSPKPWIYATSNLASGVPVRFSGSGSGTSYSLTISRVEAEDAATYYCQQWTSNPPTFGGGTKLEIKGGGGSGGGGSGGGGSQVQLQQPGAELVKPGASVKMSCKASGYTFTSYNMHWVKQTPGRGLEWIGAIYPGNGDTSYNQKFKGKATLTADKSSSTAYMQLSSLTSEDSAVYYCARSTYYGGDWYFNVWGAGTTVTVSTRGMRTEDLPKAVVFLEPQWYRVLEKDSVTLKCQGAYSPEDNSTQWFHNESLISSQASSYFIDAATVDDSGEYRCQTNLSTLSDPVQLEVHIGWLLLQAPRWVFKEEDPIHLRCHSWKNTALHKVTYLQNGKGRKYFHHNSDFYIPKATLKDSGSYFCRGLVGSKNVSSETVNITITQGLAVPTISSFFPPGYQVSFCLVMVLLFAVDTGLYFSVKTNIRSSTRDWKDHKFKWRKDPQDK

SEQ ID NO: 10250 - protein, 502 aa, -Artificial-Sequence
MALPVTALLLPLALLLHAARPDIQLTQSHKFLSTSVGDRVSITCKASQDVYNAVAWYQQKPGQSPKLLIYSASSRYTGVPSRFTGSGSGPDFTFTISSVQAEDLAVYFCQQHFRTPFTFGSGTKLEIKGGGGSGGGGSGGGGSQVQLQQSGPELKKPGETVKISCKASGYPFTNYGMNWVKQAPGQGLKWMGWINTSTGESTFADDFKGRFDFSLETSANTAYLQINNLKSEDMATYFCARWEVYHGYVPYWGQGTTVTVSSTRGMRTEDLPKAVVFLEPQWYRVLEKDSVTLKCQGAYSPEDNSTQWFHNESLISSQASSYFIDAATVDDSGEYRCQTNLSTLSDPVQLEVHIGWLLLQAPRWVFKEEDPIHLRCHSWKNTALHKVTYLQNGKGRKYFHHNSDFYIPKATLKDSGSYFCRGLVGSKNVSSETVNITITQGLAVPTISSFFPPGYQVSFCLVMVLLFAVDTGLYFSVKTNIRSSTRDWKDHKFKWRKDPQDK

SEQ ID NO: 10251 - protein, 501 aa, -Artificial-Sequence
MALPVTALLLPLALLLHAARPDIQLTQSPSSLSASVGDRVTITCKASQDVGTSVAWYQQKPGKAPKLLIYWTSTRHTGVPSRFSGSGSGTDFTFTISSLQPEDIATYYCQQYSLYRSFGQGTKVEIKGGGGSGGGGSGGGGSEVQLVESGGGVVQPGRSLRLSCSASGFDFTTYWMSWVRQAPGKGLEWIGEIHPDSSTINYAPSLKDRFTISRDNAKNTLFLQMDSLRPEDTGVYFCASLYFGFPWFAYWGQGTPVTVSSTRGMRTEDLPKAVVFLEPQWYRVLEKDSVTLKCQGAYSPEDNSTQWFHNESLISSQASSYFIDAATVDDSGEYRCQTNLSTLSDPVQLEVHIGWLLLQAPRWVFKEEDPIHLRCHSWKNTALHKVTYLQNGKGRKYFHHNSDFYIPKATLKDSGSYFCRGLVGSKNVSSETVNITITQGLAVPTISSFFPPGYQVSFCLVMVLLFAVDTGLYFSVKTNIRSSTRDWKDHKFKWRKDPQDK

SEQ ID NO: 10252 - protein, 505 aa, -Artificial-Sequence
MALPVTALLLPLALLLHAARPDIQLTQSPSSLSASVGDRVTITCSTSSSVSYMHWYQQKPGKAPKLLIYSTSNLASGVPSRFSGSGSGTDFTFTISSLQPEDIATYYCHQWSSYPTFGQGTKVEIKGGGGSGGGGSGGGGSGVHSQVQLQESGPGLVRPSQTLSLTCTVSGFTISSGYSWHWVRQPPGRGLEWIGYIQYSGITNYNPSLKSRVTMLVDTSKNQFSLRLSSVTAADTAVYYCAREDYDYHWYFDVWGQGTTVTVSSTRGMRTEDLPKAVVFLEPQWYRVLEKDSVTLKCQGAYSPEDNSTQWFHNESLISSQASSYFIDAATVDDSGEYRCQTNLSTLSDPVQLEVHIGWLLLQAPRWVFKEEDPIHLRCHSWKNTALHKVTYLQNGKGRKYFHHNSDFYIPKATLKDSGSYFCRGLVGSKNVSSETVNITITQGLAVPTISSFFPPGYQVSFCLVMVLLFAVDTGLYFSVKTNIRSSTRDWKDHKFKWRKDPQDK

SEQ ID NO: 10253 - protein, 505 aa, -Artificial-Sequence
MALPVTALLLPLALLLHAARPDIQMTQSPSSLSASVGDRVTITCRASQDVNTAVAWYQQKPGKAPKLLIYSASFLYSGVPSRFSGSRSGTDFTLTISSLQPEDFATYYCQQAYTTPPTFGQGTKVEIKRTGGGGSGGGGSGGGGSEVQLVESGGGLVQPGGSLRLSCAASGFNIKDTYIHWVRQAPGKGLEWVARIYPTNGYTRYADSVKGRFTISADTSKNTAYLQMNSLRAEDTAVYYCSRWGGAGAYAMDVWGQGTLVTVSSTRGMRTEDLPKAVVFLEPQWYRVLEKDSVTLKCQGAYSPEDNSTQWFHNESLISSQASSYFIDAATVDDSGEYRCQTNLSTLSDPVQLEVHIGWLLLQAPRWVFKEEDPIHLRCHSWKNTALHKVTYLQNGKGRKYFHHNSDFYIPKATLKDSGSYFCRGLVGSKNVSSETVNITITQGLAVPTISSFFPPGYQVSFCLVMVLLFAVDTGLYFSVKTNIRSSTRDWKDHKFKWRKDPQDK

SEQ ID NO: 10254 - protein, 508 aa, -Artificial-Sequence
MALPVTALLLPLALLLHAARPEIVLTQSPGTLSLSPGERATLSCRASQSVSSDYLAWYQQKPGQAPRLLIYGASSRATGIPDRFSGSGSGTDFTLTISRLPEDFAVYYCQQYVSYWTFGGGTKVEIKRTVAAGGGGSGGGGSGGGGSQVQLVESGGGVVQPGRSLRLSCAASGFTFSSYAMHWVRQAPGKGLEWVAVISYDGSNKYYADSVKGRFTISRDNSKNTLYLQMNSLRAEDTAVYYCAKEAPYYAKDYMDVWGKGTTVTVSSTRGMRTEDLPKAVVFLEPQWYRVLEKDSVTLKCQGAYSPEDNSTQWFHNESLISSQASSYFIDAATVDDSGEYRCQTNLSTLSDPVQLEVHIGWLLLQAPRWVFKEEDPIHLRCHSWKNTALHKVTYLQNGKGRKYFHHNSDFYIPKATLKDSGSYFCRGLVGSKNVSSETVNITITQGLAVPTISSFFPPGYQVSFCLVMVLLFAVDTGLYFSVKTNIRSSTRDWKDHKFKWRKDPQDK

SEQ ID NO: 10255 - protein, 507 aa, -Artificial-Sequence
MALPVTALLLPLALLLHAARPSYELIQPPSAAVTLGNTVSLTCVGDELPKRYAYWYQQKPDQSIVRVIYEDSVRPPGISDRFSGSSSGTTATLTIRDAQNEDEADYYCQSTYGDDKLYIFGGGTKLTVLGGGGGSGGGGSGGGGSEVQLVETGGGLVQPGKSLELTCATSGFTFNTAWMHWVRQSPDKRLEWIARIKDTSNNYATDYVESMKGRFTISRDDSKGSVNLQMNSLKEEDTATYYCTTDFYDGTYYWNYWGQGVMVTVSSTRGMRTEDLPKAVVFLEPQWYRVLEKDSVTLKCQGAYSPEDNSTQWFHNESLISSQASSYFIDAATVDDSGEYRCQTNLSTLSDPVQLEVHIGWLLLQAPRWVFKEEDPIHLRCHSWKNTALHKVTYLQNGKGRKYFHHNSDFYIPKATLKDSGSYFCRGLVGSKNVSSETVNITITQGLAVPTISSFFPPGYQVSFCLVMVLLFAVDTGLYFSVKTNIRSSTRDWKDHKFKWRKDPQDK

SEQ ID NO: 10256 - protein, 511 aa, -Artificial-Sequence
MALPVTALLLPLALLLHAARPSVIELTQSPKFMSTSVGDRVNVTYKASQNVGTNVAWFQQKPGQSPKVLIYSASYRYSGVPDRFTGSGSGTDFTLTISNVQSEDLAEYFCQQYHTYPLTFGGGTKLEIKRGGGGSGGGGSGGGGSRMAQVQLQQSGAELARPGASVKMSCKASGYTFTTYTIHWVRRRPGHDLEWIGYINPSSGCSDYNQNFKGKTTLTADKSSNTAYMQLNSLTSEDSAVYYCARRADYGNYEYTWFAYWGQGTTVTVSSTRGMRTEDLPKAVVFLEPQWYRVLEKDSVTLKCQGAYSPEDNSTQWFHNESLISSQASSYFIDAATVDDSGEYRCQTNLSTLSDPVQLEVHIGWLLLQAPRWVFKEEDPIHLRCHSWKNTALHKVTYLQNGKGRKYFHHNSDFYIPKATLKDSGSYFCRGLVGSKNVSSETVNITITQGLAVPTISSFFPPGYQVSFCLVMVLLFAVDTGLYFSVKTNIRSSTRDWKDHKFKWRKDPQDK

SEQ ID NO: 10257 - protein, 502 aa, -Artificial-Sequence
MALPVTALLLPLALLLHAARPDIQMTQSPSSVSASVGDRVTITCRASQSVSSYLNWYQQKPGKAPKLLIYAASSLQSGVPSRFSGSGSGTDFTLTISSLQPEDFATYYCQQSYSTPWTFGQGTKLEIKRGGGGSGGGGSGGGGSEVQLVESGGGLVQPGRSLRLSCAASGFTFDDYGMHWVRQAPGKGLEWVSGISWNSGSIGYADSAKGRFTISRDNSKNTLYLQMNSLRAEDTAVYYCAKRGNSNSFDYWGQGTLVTVSSTRGMRTEDLPKAVVFLEPQWYRVLEKDSVTLKCQGAYSPEDNSTQWFHNESLISSQASSYFIDAATVDDSGEYRCQTNLSTLSDPVQLEVHIGWLLLQAPRWVFKEEDPIHLRCHSWKNTALHKVTYLQNGKGRKYFHHNSDFYIPKATLKDSGSYFCRGLVGSKNVSSETVNITITQGLAVPTISSFFPPGYQVSFCLVMVLLFAVDTGLYFSVKTNIRSSTRDWKDHKFKWRKDPQDK

SEQ ID NO: 10258 - protein, 509 aa, -Artificial-Sequence
MALPVTALLLPLALLLHAARPQSALTQPRSVSGSPGQSVTISCTGTSSDVGSYNYVSWYQQSPGKAPKLMIYDVSNRPSGVSNRFSGSKSGNTASLTISGLQSEDEADYYCTSYGSYDIPVIFGGGTKVEIKGGGGSGGGGSGGGGSQMQLVQSGAEVKKPGSSVKVSCKASGGTFSSYAISWVRQAPGQGLEWMGGIIPIFGTANYAQKFQGRVTITADKSTSTAYMELSSLRSDDTAVYYCARDELWATNYYYMDVWGKGTLVTVSSTRGMRTEDLPKAVVFLEPQWYRVLEKDSVTLKCQGAYSPEDNSTQWFHNESLISSQASSYFIDAATVDDSGEYRCQTNLSTLSDPVQLEVHIGWLLLQAPRWVFKEEDPIHLRCHSWKNTALHKVTYLQNGKGRKYFHHNSDFYIPKATLKDSGSYFCRGLVGSKNVSSETVNITITQGLAVPTISSFFPPGYQVSFCLVMVLLFAVDTGLYFSVKTNIRSSTRDWKDHKFKWRKDPQDK

SEQ ID NO: 10259 - protein, 502 aa, -Artificial-Sequence
MALPVTALLLPLALLLHAARPDVVMTQSPSSLSASVGDRVTITCKASQSVSSYLNWYQQKPGKAPKLLIYAASSLETGVPSRFSGSGSGTDFTLTISSLQPEDFATYYCQQSYSTPWTFGQGTKVEIKRGGGGSGGGGSGGGGSEVQLVESGGGLVRPGGSLRLSCAASGFTFDDYGMSWVRQAPGKGLEWVSGISWNSGSIGYADSVKGRFTISRDNAKNSLYLQMNSLRAEDTALYYCAKRGNSNSFDYWGQGTTVTVSSTRGMRTEDLPKAVVFLEPQWYRVLEKDSVTLKCQGAYSPEDNSTQWFHNESLISSQASSYFIDAATVDDSGEYRCQTNLSTLSDPVQLEVHIGWLLLQAPRWVFKEEDPIHLRCHSWKNTALHKVTYLQNGKGRKYFHHNSDFYIPKATLKDSGSYFCRGLVGSKNVSSETVNITITQGLAVPTISSFFPPGYQVSFCLVMVLLFAVDTGLYFSVKTNIRSSTRDWKDHKFKWRKDPQDK

SEQ ID NO: 10260 - protein, 502 aa, -Artificial-Sequence
MALPVTALLLPLALLLHAARPDIQMTQSPSSVSASVGDRVTITCRASQSISSYLNWYQQKPGKAPKLLIYAASSLQSGVPSRFSGSGSGTDFTLTISSLQPEDFATYYCQQSYSTPWTFGQGTKVEIKRGGGGSGGGGSGGGGSEVQLVESGGGLVQPGRSLRLSCAASGFTFDDYAMHWVRQAPGKGLEWVSGISWNSGSIGYADSAKGRFTISRDNSKNTLYLQMNSLRAEDTAVYYCAKRGNSNSFDYWGQGTLVTVSSTRGMRTEDLPKAVVFLEPQWYRVLEKDSVTLKCQGAYSPEDNSTQWFHNESLISSQASSYFIDAATVDDSGEYRCQTNLSTLSDPVQLEVHIGWLLLQAPRWVFKEEDPIHLRCHSWKNTALHKVTYLQNGKGRKYFHHNSDFYIPKATLKDSGSYFCRGLVGSKNVSSETVNITITQGLAVPTISSFFPPGYQVSFCLVMVLLFAVDTGLYFSVKTNIRSSTRDWKDHKFKWRKDPQDK

SEQ ID NO: 10261 - protein, 502 aa, -Artificial-Sequence
MALPVTALLLPLALLLHAARPDTVLTQSPALAVSPGERVTISCKASESVSTRMHWYRQKPGQQPKLLIYKTSNLASGVPARFSGSGSGTDFTLTIDPVEADDTATYFCQQSWNGPLTFGSGTKLEIKRGGGGSGGGGSGGGGSQVQLKESGPGLVQPSQTLSLTCTVSGLSLTSNGVSWIRQPPGKGLEWLGVIWSNGGTDYNSAIKSRLSFSRDTSKSQVFLKMNSLQTEDTAMYFCARPRYNSGYFFDYWGQGVMVTVSSTRGMRTEDLPKAVVFLEPQWYRVLEKDSVTLKCQGAYSPEDNSTQWFHNESLISSQASSYFIDAATVDDSGEYRCQTNLSTLSDPVQLEVHIGWLLLQAPRWVFKEEDPIHLRCHSWKNTALHKVTYLQNGKGRKYFHHNSDFYIPKATLKDSGSYFCRGLVGSKNVSSETVNITITQGLAVPTISSFFPPGYQVSFCLVMVLLFAVDTGLYFSVKTNIRSSTRDWKDHKFKWRKDPQDK

SEQ ID NO: 10262 - protein, 514 aa, -Artificial-Sequence
MALPVTALLLPLALLLHAARPDLVMTQSPFSLAVSEGEMVTIKCKSSQSLLSSRHQKNFLAWYRQKPGQSPKLLIYHASTRQSGVPDRFIGSGSGTDFTLTISDVQAEDLADYYCLQHYTSPYTFGAGTKLELKRGGGGSGGGGSGGGGSQVQLKESGPGLVQPSQTLSLTCTVSGFSLTSYHVHWVRQPPGKGLEWMGVMWSDGDTLYNSALKSRLSISRDTSKSQVLLQMDSLQSEDTATYYCARLQVFGYPGIRDYVMDAWGQGASVTVSSTRGMRTEDLPKAVVFLEPQWYRVLEKDSVTLKCQGAYSPEDNSTQWFHNESLISSQASSYFIDAATVDDSGEYRCQTNLSTLSDPVQLEVHIGWLLLQAPRWVFKEEDPIHLRCHSWKNTALHKVTYLQNGKGRKYFHHNSDFYIPKATLKDSGSYFCRGLVGSKNVSSETVNITITQGLAVPTISSFFPPGYQVSFCLVMVLLFAVDTGLYFSVKTNIRSSTRDWKDHKFKWRKDPQDK

SEQ ID NO: 10263 - protein, 515 aa, -Artificial-Sequence
MALPVTALLLPLALLLHAARPDIQLTQSPSFLSASVGDRVTITCRASQDISSYLAWYQQKPGNAPKLLIYAASLLQSGVPSRFSAFGSGTEFTLTISSLQPEDFATYYCQHLKSYPLFTFGPGTKVDIKRGGGGSGGGGSGGGGSEVQLVESGGRVVRPGGSLRLSCAASGFTFDDYGMSWVRQPPGKGLEFVSGLNWNGDITAFTDSVKGRFTISRDNVKSSLYLQMNSLRADDTAFYYCARVRTWGDYTTGEEIINSWYFDLWGRGTLVTVSSTRGMRTEDLPKAVVFLEPQWYRVLEKDSVTLKCQGAYSPEDNSTQWFHNESLISSQASSYFIDAATVDDSGEYRCQTNLSTLSDPVQLEVHIGWLLLQAPRWVFKEEDPIHLRCHSWKNTALHKVTYLQNGKGRKYFHHNSDFYIPKATLKDSGSYFCRGLVGSKNVSSETVNITITQGLAVPTISSFFPPGYQVSFCLVMVLLFAVDTGLYFSVKTNIRSSTRDWKDHKFKWRKDPQDK

SEQ ID NO: 10264 - protein, 503 aa, -Artificial-Sequence
MALPVTALLLPLALLLHAARPELQMTQSPSSLSASVGDRVAITCRASQSISSHLNWYQQKPGKAPKLLIYAASSLQSGVPSRFSGSGSGTDFTLTISSLQPEDFATYYCQQSYSTPYTFGQGTKLEIKGGGGSGGGGSGGGGSEVQLVESGGGLVQPGGSLRLSCAASGFTFSSYWMSWVRQAPGKGLEWVANIKQDGSEKYYVDSVKGRFTISRDNAKNSLYLRMNSLRAEDTAVYYCARAWGYSSYYFDYWGQGTLVTVSPTRGMRTEDLPKAVVFLEPQWYRVLEKDSVTLKCQGAYSPEDNSTQWFHNESLISSQASSYFIDAATVDDSGEYRCQTNLSTLSDPVQLEVHIGWLLLQAPRWVFKEEDPIHLRCHSWKNTALHKVTYLQNGKGRKYFHHNSDFYIPKATLKDSGSYFCRGLVGSKNVSSETVNITITQGLAVPTISSFFPPGYQVSFCLVMVLLFAVDTGLYFSVKTNIRSSTRDWKDHKFKWRKDPQDK

SEQ ID NO: 10265 - protein, 499 aa, -Artificial-Sequence
MALPVTALLLPLALLLHAARPDIVMTQSHKFMSTSVGDRVSIICKASQDVGTAVDWYQQKPGQSPKLLIYWASTRHTGVPDRFTGSGSGTDFTLAITNVQSEDLADYFCQQYNSYPLTFGAGTKLEIKRGGGGSGGGGSGGGGSEVQLQQSGPELVKPGTSVRISCKTSGYTFTEYTIHWVKQSHGKSLEWIGNINPNNGGTTYNQKFEDKATLTVDKSSSTAYMELRSLTSEDSAVYYCAAGWNFDYWGQGTTLTVSSTRGMRTEDLPKAVVFLEPQWYRVLEKDSVTLKCQGAYSPEDNSTQWFHNESLISSQASSYFIDAATVDDSGEYRCQTNLSTLSDPVQLEVHIGWLLLQAPRWVFKEEDPIHLRCHSWKNTALHKVTYLQNGKGRKYFHHNSDFYIPKATLKDSGSYFCRGLVGSKNVSSETVNITITQGLAVPTISSFFPPGYQVSFCLVMVLLFAVDTGLYFSVKTNIRSSTRDWKDHKFKWRKDPQDK

SEQ ID NO: 10266 - protein, 499 aa, -Artificial-Sequence
MALPVTALLLPLALLLHAARPDIQMTQSPSSLSASVGDRVTITCKASQDVGTAVDWYQQKPGKAPKLLIYWASTRHTGVPSRFSGSGSGTDFTLTISSLQPEDFATYYCQQYNSYPLTFGQGTKVEIKRGGGGSGGGGSGGGGSEVQLVESGGGLVQPGGSLRLSCAASGYTFTEYTIHWVRQAPGKGLEWVANINPNNGGTTYNQKFEDRFTISRDNSKNTLYLQMNSLRAEDTAVYYCARGWNFDYWGQGTLVTVSSTRGMRTEDLPKAVVFLEPQWYRVLEKDSVTLKCQGAYSPEDNSTQWFHNESLISSQASSYFIDAATVDDSGEYRCQTNLSTLSDPVQLEVHIGWLLLQAPRWVFKEEDPIHLRCHSWKNTALHKVTYLQNGKGRKYFHHNSDFYIPKATLKDSGSYFCRGLVGSKNVSSETVNITITQGLAVPTISSFFPPGYQVSFCLVMVLLFAVDTGLYFSVKTNIRSSTRDWKDHKFKWRKDPQDK

SEQ ID NO: 10267 - protein, 501 aa, -Artificial-Sequence
MALPVTALLLPLALLLHAARPDIQMTQSPSSLSASVGDRVTITCKASQDVGTAVDWYQQKPGKAPKLLISWASTRHTGVPSRFSGSGSGTDFTLTISSLQPEDFATYFCQQYNSYPLTFGQGTKVEIKRTVGGGGSGGGGSGGGGSQVQLVQSGAEVKKPGESVKVSCKASGYTFTEYTIHWVRQAPGQGLEWMGNINPNNGGTTYNQKFEDRVTITADKSTSTAYMELSSLRSEDTAVYYCARGWNFDYWGQGTTVTVSSTRGMRTEDLPKAVVFLEPQWYRVLEKDSVTLKCQGAYSPEDNSTQWFHNESLISSQASSYFIDAATVDDSGEYRCQTNLSTLSDPVQLEVHIGWLLLQAPRWVFKEEDPIHLRCHSWKNTALHKVTYLQNGKGRKYFHHNSDFYIPKATLKDSGSYFCRGLVGSKNVSSETVNITITQGLAVPTISSFFPPGYQVSFCLVMVLLFAVDTGLYFSVKTNIRSSTRDWKDHKFKWRKDPQDK

SEQ ID NO: 10268 - protein, 499 aa, -Artificial-Sequence
MALPVTALLLPLALLLHAARPDIQMTQSPSSLSASVGDRVTITCKASQDVGTAVDWYQQKPGKAPKLLIYWASTRHTGVPSRFSGSGSGTDFTLTISSLQPEDFATYYCQQYNSYPLTFGQGTKVEIKRGGGGSGGGGSGGGGSEVQLQQSGPELVKPGTSVRISCKTSGYTFTEYTIHWVKQSHGKSLEWIGNINPNNGGTTYNQKFEDKATLTVDKSSSTAYMELRSLTSEDSAVYYCAAGWNFDYWGQGTTLTVSSTRGMRTEDLPKAVVFLEPQWYRVLEKDSVTLKCQGAYSPEDNSTQWFHNESLISSQASSYFIDAATVDDSGEYRCQTNLSTLSDPVQLEVHIGWLLLQAPRWVFKEEDPIHLRCHSWKNTALHKVTYLQNGKGRKYFHHNSDFYIPKATLKDSGSYFCRGLVGSKNVSSETVNITITQGLAVPTISSFFPPGYQVSFCLVMVLLFAVDTGLYFSVKTNIRSSTRDWKDHKFKWRKDPQDK

SEQ ID NO: 10269 - protein, 499 aa, -Artificial-Sequence
MALPVTALLLPLALLLHAARPDIVMTQSHKFMSTSVGDRVSIICKASQDVGTAVDWYQQKPGQSPKLLIYWASTRHTGVPDRFTGSGSGTDFTLAITNVQSEDLADYFCQQYNSYPLTFGAGTKLEIKRGGGGSGGGGSGGGGSEVQLVESGGGLVQPGGSLRLSCAASGYTFTEYTIHWVRQAPGKGLEWVANINPNNGGTTYNQKFEDRFTISRDNSKNTLYLQMNSLRAEDTAVYYCARGWNFDYWGQGTLVTVSSTRGMRTEDLPKAVVFLEPQWYRVLEKDSVTLKCQGAYSPEDNSTQWFHNESLISSQASSYFIDAATVDDSGEYRCQTNLSTLSDPVQLEVHIGWLLLQAPRWVFKEEDPIHLRCHSWKNTALHKVTYLQNGKGRKYFHHNSDFYIPKATLKDSGSYFCRGLVGSKNVSSETVNITITQGLAVPTISSFFPPGYQVSFCLVMVLLFAVDTGLYFSVKTNIRSSTRDWKDHKFKWRKDPQDK

SEQ ID NO: 10270 - protein, 505 aa, -Artificial-Sequence
MALPVTALLLPLALLLHAARPEIVLTQSPATLSLSPGERATLSCSATSSVSYIHWYQQKPGQAPRLLIYSTSNLASGIPARFSGSGSGTDFTLTIGRLEPEDFAVYYCQQRSSSPFTFGQGTKVEIKRGGGGSGGGGSGGGGSEVQLVESGGGLVKPEGSLRLSCAASGFTFSRYGMSWVRQAPGKGLEWVSTISGGGTYIYYPDSVKGRFTISRDNAKNSLFLQMNSLRAEDTAVYYCARDNYGRNYDYGMDYWGQGTLVTVSSTRGMRTEDLPKAVVFLEPQWYRVLEKDSVTLKCQGAYSPEDNSTQWFHNESLISSQASSYFIDAATVDDSGEYRCQTNLSTLSDPVQLEVHIGWLLLQAPRWVFKEEDPIHLRCHSWKNTALHKVTYLQNGKGRKYFHHNSDFYIPKATLKDSGSYFCRGLVGSKNVSSETVNITITQGLAVPTISSFFPPGYQVSFCLVMVLLFAVDTGLYFSVKTNIRSSTRDWKDHKFKWRKDPQDK

SEQ ID NO: 10271 - protein, 504 aa, -Artificial-Sequence
MALPVTALLLPLALLLHAARPQIVLTQSPAIMSASPGEEVTLTCSATSSVSYIHWFQQRPGTSPKLWIYSTSNLASGVPVRFSGSGYGTSYSLTISRMEAEDAATYYCQQRSSSPFTFGSGTKLEIKGGGGSGGGGSGGGGSEVKVVESGGDLVKPGGSLKLSCVVSGFTFSRYGMSWVRQTPGKRLEWVATISGGGTYIYYPDSVKGRFTISRDNAKNTLYLQMSSLKSEDTAMYHCTRDNYGRNYDYGMDYWGQGTSVTVSSTRGMRTEDLPKAVVFLEPQWYRVLEKDSVTLKCQGAYSPEDNSTQWFHNESLISSQASSYFIDAATVDDSGEYRCQTNLSTLSDPVQLEVHIGWLLLQAPRWVFKEEDPIHLRCHSWKNTALHKVTYLQNGKGRKYFHHNSDFYIPKATLKDSGSYFCRGLVGSKNVSSETVNITITQGLAVPTISSFFPPGYQVSFCLVMVLLFAVDTGLYFSVKTNIRSSTRDWKDHKFKWRKDPQDK

SEQ ID NO: 10272 - protein, 510 aa, -Artificial-Sequence
MALPVTALLLPLALLLHAARPDIVLTQSPASLAVSPGQRATITCRASKSVSTSGYSYMHWYQQKPGQPPKLLIYLASNLESGVPARFSGSGSGTDFTLTINPVEANDTANYYCQHSRELPFTFGGGTKVEIKRTGGGGSGGGGSGGGGSEVQLVESGGGLVKPGGSLRLSCAASGFTFSGYAMSWVRQAPGKGLEWVSTISSGGTYIYYPDSVKGRFTISRDNAKNSLYLQMNSLRAEDTAVYYCARLGGDNYYEYFDVWGKGTTVTVSSTRGMRTEDLPKAVVFLEPQWYRVLEKDSVTLKCQGAYSPEDNSTQWFHNESLISSQASSYFIDAATVDDSGEYRCQTNLSTLSDPVQLEVHIGWLLLQAPRWVFKEEDPIHLRCHSWKNTALHKVTYLQNGKGRKYFHHNSDFYIPKATLKDSGSYFCRGLVGSKNVSSETVNITITQGLAVPTISSFFPPGYQVSFCLVMVLLFAVDTGLYFSVKTNIRSSTRDWKDHKFKWRKDPQDK

SEQ ID NO: 10273 - protein, 501 aa, -Artificial-Sequence
MALPVTALLLPLALLLHAARPDIQMTQSPSSLSVSVGDRVTITCKASQNVRTVVAWYQQKPGLAPKTLIYLASNRHTGVPSRFSGSGSGTDFTFTISSLQPEDIATYFCQQHWSYPLTFGQGTKVEVKRGGGGSGGGGSGGGGSEVQLLESGGGLVQPGGSLRLSCAASGFAFSTYDMSWVRQAPGKGLEWVATISSGGSYTYYLDSVKGRFTISRDSSKNTLYLQMNSLQAEDSAIYYCAPTTVVPFAYWGQGTLVTVSSTRGMRTEDLPKAVVFLEPQWYRVLEKDSVTLKCQGAYSPEDNSTQWFHNESLISSQASSYFIDAATVDDSGEYRCQTNLSTLSDPVQLEVHIGWLLLQAPRWVFKEEDPIHLRCHSWKNTALHKVTYLQNGKGRKYFHHNSDFYIPKATLKDSGSYFCRGLVGSKNVSSETVNITITQGLAVPTISSFFPPGYQVSFCLVMVLLFAVDTGLYFSVKTNIRSSTRDWKDHKFKWRKDPQDK

SEQ ID NO: 10274 - protein, 505 aa, -Artificial-Sequence
MALPVTALLLPLALLLHAARPDIQMTQSPSSLSASVGDRVTITCKSSQSLLYSSNQKNYLAWFQQKPGKAPKLLIYWASTRESGVPSRFSGSGSGTDFTLTISSLQPEDFATYFCHQYLSSYTFGQGTKVEIKRGGGGSGGGGSGGGGSEVQLVESGGGLVQPGGSLRLSCAASGYTFTSYWLHWVRQAPGKGLEWVGYIRPSTGYTEYNQKFKDRFTISADTSKNTAYLQMNSLRAEDTAVYYCARSRWLLDYWGQGTLVTVSSTRGMRTEDLPKAVVFLEPQWYRVLEKDSVTLKCQGAYSPEDNSTQWFHNESLISSQASSYFIDAATVDDSGEYRCQTNLSTLSDPVQLEVHIGWLLLQAPRWVFKEEDPIHLRCHSWKNTALHKVTYLQNGKGRKYFHHNSDFYIPKATLKDSGSYFCRGLVGSKNVSSETVNITITQGLAVPTISSFFPPGYQVSFCLVMVLLFAVDTGLYFSVKTNIRSSTRDWKDHKFKWRKDPQDK

SEQ ID NO: 10275 - protein, 504 aa, -Artificial-Sequence
MALPVTALLLPLALLLHAARPDIQMTQSPSSLSASVGDRVTITCKSSQSVLYSSNQKNYLAWFQQKPGKAPKLLIYWASTRESGVPSRFSGSGSGTDFTLTISSLQPEDFATYFCHQYLSSYTFGQGTKVEIKRGGGGSGGGGSGGGGSEVQLVESGGGLVQPGGSLRLSCAASGFTFTTYWMHWVRQAPGKGLEWVGYIRPSTGYTEYNQKFKDRFTISADTSKNTAYLQMNSLRAEDTAVYYCARSRWLLDYWGQGTLVTVSTRGMRTEDLPKAVVFLEPQWYRVLEKDSVTLKCQGAYSPEDNSTQWFHNESLISSQASSYFIDAATVDDSGEYRCQTNLSTLSDPVQLEVHIGWLLLQAPRWVFKEEDPIHLRCHSWKNTALHKVTYLQNGKGRKYFHHNSDFYIPKATLKDSGSYFCRGLVGSKNVSSETVNITITQGLAVPTISSFFPPGYQVSFCLVMVLLFAVDTGLYFSVKTNIRSSTRDWKDHKFKWRKDPQDK

SEQ ID NO: 10276 - protein, 504 aa, -Artificial-Sequence
MALPVTALLLPLALLLHAARPEVQLVESGGGLVQPGGSLRLSCAASGYTFTTYWMHWVRQAPGKGLEWVGYIRPSTGYTEYNQKFKDRFTISADTSKNTAYLQMNSLRAEDTAVYYCARSRWLLDYWGQGTLVTVSGGGGSGGGGSGGGGSDIQMTQSPSSLSASVGDRVTITCKSSQSLLYSSNQKNYLAWFQQKPGKAPKLLIYWASTRESGVPSRFSGSGSGTDFTLTISSLQPEDFATYFCHQYLSSYTFGQGTKVEIKRTRGMRTEDLPKAVVFLEPQWYRVLEKDSVTLKCQGAYSPEDNSTQWFHNESLISSQASSYFIDAATVDDSGEYRCQTNLSTLSDPVQLEVHIGWLLLQAPRWVFKEEDPIHLRCHSWKNTALHKVTYLQNGKGRKYFHHNSDFYIPKATLKDSGSYFCRGLVGSKNVSSETVNITITQGLAVPTISSFFPPGYQVSFCLVMVLLFAVDTGLYFSVKTNIRSSTRDWKDHKFKWRKDPQDK

SEQ ID NO: 10277 - protein, 501 aa, -Artificial-Sequence
MALPVTALLLPLALLLHAARPDIQMTQSPSSLSASVGDRVTITCRASQDISNYLNWYQQKPGKAPKLLIYYTSRLHSGVPSRFSGSGSGTDFTLTISSLQPEDFATYYCQQGNTLPYTFGQGTKVEIKRGGGGSGGGGSGGGGSEVQLVESGGGLVQPGGSLRLSCAASGYTFSDYFMSWVRQAPGKGLEWVATISNGGTYTYYPDSVKGRFTISRDNSKNTLYLQMNSLRAEDTAVYYCARFDGYIFDYWGQGTLVTVSSTRGMRTEDLPKAVVFLEPQWYRVLEKDSVTLKCQGAYSPEDNSTQWFHNESLISSQASSYFIDAATVDDSGEYRCQTNLSTLSDPVQLEVHIGWLLLQAPRWVFKEEDPIHLRCHSWKNTALHKVTYLQNGKGRKYFHHNSDFYIPKATLKDSGSYFCRGLVGSKNVSSETVNITITQGLAVPTISSFFPPGYQVSFCLVMVLLFAVDTGLYFSVKTNIRSSTRDWKDHKFKWRKDPQDK

SEQ ID NO: 10278 - protein, 501 aa, -Artificial-Sequence
MALPVTALLLPLALLLHAARPDIQMTQSPSSLSASVGDRVTITCRASQDISSYLNWYQQKPGKAPKLLIYYTSRLHSGVPSRFSGSGSGTDFTLTISSLQPEDFATYYCQQGNTLPYTFGQGTKVEIKRGGGGSGGGGSGGGGSEVQLVESGGGLVQPGGSLRLSCAASGFTFSDYFMSWVRQAPGKGLEWVATISNGGTYTYYPDSVKGRFTISRDNSKNTLYLQMNSLRAEDTAVYYCARFDGYIFDYWGQGTLVTVSSTRGMRTEDLPKAVVFLEPQWYRVLEKDSVTLKCQGAYSPEDNSTQWFHNESLISSQASSYFIDAATVDDSGEYRCQTNLSTLSDPVQLEVHIGWLLLQAPRWVFKEEDPIHLRCHSWKNTALHKVTYLQNGKGRKYFHHNSDFYIPKATLKDSGSYFCRGLVGSKNVSSETVNITITQGLAVPTISSFFPPGYQVSFCLVMVLLFAVDTGLYFSVKTNIRSSTRDWKDHKFKWRKDPQDK

SEQ ID NO: 10279 - protein, 501 aa, -Artificial-Sequence
MALPVTALLLPLALLLHAARPDIQMTQSPSSLSASVGDRVTITCRASQDISNYLNWYQQKPGKAPKLLIYYTSRLHSGVPSRFSGSGSGTDFTLTISSLQPEDFATYYCQQGNTLPWTFGQGTKVEIKRGGGGSGGGGSGGGGSEVQLVESGGGLVQPGGSLRLSCAASGFTFSDYFMSWVRQAPGKGLEWVATISNGGTYTYYPDSVKGRFTISRDNSKNTLYLQMNSLRAEDTAVYYCARFDGYIFDYWGQGTLVTVSSTRGMRTEDLPKAVVFLEPQWYRVLEKDSVTLKCQGAYSPEDNSTQWFHNESLISSQASSYFIDAATVDDSGEYRCQTNLSTLSDPVQLEVHIGWLLLQAPRWVFKEEDPIHLRCHSWKNTALHKVTYLQNGKGRKYFHHNSDFYIPKATLKDSGSYFCRGLVGSKNVSSETVNITITQGLAVPTISSFFPPGYQVSFCLVMVLLFAVDTGLYFSVKTNIRSSTRDWKDHKFKWRKDPQDK

SEQ ID NO: 10280 - protein, 506 aa, -Artificial-Sequence
MALPVTALLLPLALLLHAARPSYVLTQPPSVSVAPGQTARITCGGNNIGSKTVHWYQQPPGQAPVVVVYDDSDRPSGIPERFSGSNSGNTATLTISRVEAGDEAVYYCQVWDSSSDHVVFGGGTKLTVLGGGGSGGGGSGGGGSQLQLQESGPGLVKPSETLSLTCTVSGGSISSSSYFWGWIRQPPGKGLEWIGSIYYSGITYYNPSLKSRVTISVDTSKNQFSLKLSSVTAADTAVYYCARHDGAVAGLFDYWGQGTLVTVSSATRGMRTEDLPKAVVFLEPQWYRVLEKDSVTLKCQGAYSPEDNSTQWFHNESLISSQASSYFIDAATVDDSGEYRCQTNLSTLSDPVQLEVHIGWLLLQAPRWVFKEEDPIHLRCHSWKNTALHKVTYLQNGKGRKYFHHNSDFYIPKATLKDSGSYFCRGLVGSKNVSSETVNITITQGLAVPTISSFFPPGYQVSFCLVMVLLFAVDTGLYFSVKTNIRSSTRDWKDHKFKWRKDPQDK

SEQ ID NO: 10281 - protein, 506 aa, -Artificial-Sequence
MALPVTALLLPLALLLHAARPSYVLTQPPSVSVAPGQTARITCGGKNIGSKSVHWYQQPPGQAPVVVVYDDSDRPSGIPERFSGSNSGNTATLTISRVEAGDEAVYYCQVWDSSSDHVVFGGGTKLTVLGGGGSGGGGSGGGGSQLQLQESGPGLVKPSETLSLTCTVSGGSISSGSYIWGWIRQPPGKGLEWIGSIYYSGITYYNPSLKSRVTISVDTSKNQFSLKLSSVTAADTAVYYCARHDGAVAGLFDYWGQGTLVTVSSATRGMRTEDLPKAVVFLEPQWYRVLEKDSVTLKCQGAYSPEDNSTQWFHNESLISSQASSYFIDAATVDDSGEYRCQTNLSTLSDPVQLEVHIGWLLLQAPRWVFKEEDPIHLRCHSWKNTALHKVTYLQNGKGRKYFHHNSDFYIPKATLKDSGSYFCRGLVGSKNVSSETVNITITQGLAVPTISSFFPPGYQVSFCLVMVLLFAVDTGLYFSVKTNIRSSTRDWKDHKFKWRKDPQDK

SEQ ID NO: 10282 - protein, 506 aa, -Artificial-Sequence
MALPVTALLLPLALLLHAARPSYVLTQPPSVSVAPGQTARITCGGKNIGSKSVHWYQQPPGQAPVVVVYDDSDRPSGIPERFSGSNSGNTATLTISRVEAGDEAVYYCQVWDSSSDHVVFGGGTKLTVLGGGGSGGGGSGGGGSQLQLQESGPGLVKPSETLSLTCTVSGGSISSGSYFWGWIRQPPGKGLEWIGSIYYSGITYYNPSLKSRVTISVDTSKNQFSLKLSSVTAADTAVYYCARHDGAMAGLFDYWGQGTLVTVSSATRGMRTEDLPKAVVFLEPQWYRVLEKDSVTLKCQGAYSPEDNSTQWFHNESLISSQASSYFIDAATVDDSGEYRCQTNLSTLSDPVQLEVHIGWLLLQAPRWVFKEEDPIHLRCHSWKNTALHKVTYLQNGKGRKYFHHNSDFYIPKATLKDSGSYFCRGLVGSKNVSSETVNITITQGLAVPTISSFFPPGYQVSFCLVMVLLFAVDTGLYFSVKTNIRSSTRDWKDHKFKWRKDPQDK

SEQ ID NO: 10283 - protein, 506 aa, -Artificial-Sequence
MALPVTALLLPLALLLHAARPSYVLTQPPSVSVAPGQTARITCGGKNIGSKSVHWYQQPPGQAPVVVVYDDSDRPSGIPERFSGSNSGNTATLTISRVEAGDEAVYYCQVWDSSSDHVVFGGGTKLTVLGGGGSGGGGSGGGGSQLQLQESGPGLVKPSETLSLTCTVSGGSISSGSYFWGWIRQPPGKGLEWIGSIYYSGSTYYNPSLKSRVTISVDTSKNQFSLKLSSVTAADTAVYYCARHDGAVAGLFDYWGQGTLVTVSSATRGMRTEDLPKAVVFLEPQWYRVLEKDSVTLKCQGAYSPEDNSTQWFHNESLISSQASSYFIDAATVDDSGEYRCQTNLSTLSDPVQLEVHIGWLLLQAPRWVFKEEDPIHLRCHSWKNTALHKVTYLQNGKGRKYFHHNSDFYIPKATLKDSGSYFCRGLVGSKNVSSETVNITITQGLAVPTISSFFPPGYQVSFCLVMVLLFAVDTGLYFSVKTNIRSSTRDWKDHKFKWRKDPQDK

SEQ ID NO: 10284 - protein, 506 aa, -Artificial-Sequence
MALPVTALLLPLALLLHAARPSYVLTQPPSVSVAPGQTARITCGGKNIGSKSVHWYQQPPGQAPVVVVYDDSDRPSGIPERFSGSNSGNTATLTISRVEAGDEAVYYCQVWDSSSDHVVFGGGTKLTVLGGGGSGGGGSGGGGSQLQLQESGPGLVKPSETLSLTCTVSGGSISSGSYFWGWIRQPPGKGLEWIGSIYYSGISYYNPSLKSRVTISVDTSKNQFSLKLSSVTAADTAVYYCARHDGAVAGLFDYWGQGTLVTVSSATRGMRTEDLPKAVVFLEPQWYRVLEKDSVTLKCQGAYSPEDNSTQWFHNESLISSQASSYFIDAATVDDSGEYRCQTNLSTLSDPVQLEVHIGWLLLQAPRWVFKEEDPIHLRCHSWKNTALHKVTYLQNGKGRKYFHHNSDFYIPKATLKDSGSYFCRGLVGSKNVSSETVNITITQGLAVPTISSFFPPGYQVSFCLVMVLLFAVDTGLYFSVKTNIRSSTRDWKDHKFKWRKDPQDK

SEQ ID NO: 10285 - protein, 506 aa, -Artificial-Sequence
MALPVTALLLPLALLLHAARPSYVLTQPPSVSVAPGQTARITCGGKNIGSKSVHWYQQPPGQAPVVVVYDDSDRPSGIPERFSGSNSGNTATLTISRVEAGDEAVYYCQVWDSSSDHVVFGGGTKLTVLGGGGSGGGGSGGGGSQLQLQESGPGLVKPSETLSLTCTVSGGSISSGSYFWGWIRQPPGKGLEWIGSIYYSGITYYNPGLKSRVTISVDTSKNQFSLKLSSVTAADTAVYYCARHDGAVAGLFDYWGQGTLVTVSSATRGMRTEDLPKAVVFLEPQWYRVLEKDSVTLKCQGAYSPEDNSTQWFHNESLISSQASSYFIDAATVDDSGEYRCQTNLSTLSDPVQLEVHIGWLLLQAPRWVFKEEDPIHLRCHSWKNTALHKVTYLQNGKGRKYFHHNSDFYIPKATLKDSGSYFCRGLVGSKNVSSETVNITITQGLAVPTISSFFPPGYQVSFCLVMVLLFAVDTGLYFSVKTNIRSSTRDWKDHKFKWRKDPQDK

SEQ ID NO: 10286 - protein, 506 aa, -Artificial-Sequence
MALPVTALLLPLALLLHAARPSYVLTQPPSVSVAPGQTARITCGGKNIGSKSVHWYQQPPGQAPVVVVYDDSDRPSGIPERFSGSNSGNTATLTISRVEAGDEAVYYCQVWDSSSDHVVFGGGTKLTVLGGGGSGGGGSGGGGSQLQLQESGPGLVKPSETLSLTCTVSGGSISSGSYFWGWIRQPPGKGLEWIGSIYYSGITYYNPTLKSRVTISVDTSKNQFSLKLSSVTAADTAVYYCARHDGAVAGLFDYWGQGTLVTVSSATRGMRTEDLPKAVVFLEPQWYRVLEKDSVTLKCQGAYSPEDNSTQWFHNESLISSQASSYFIDAATVDDSGEYRCQTNLSTLSDPVQLEVHIGWLLLQAPRWVFKEEDPIHLRCHSWKNTALHKVTYLQNGKGRKYFHHNSDFYIPKATLKDSGSYFCRGLVGSKNVSSETVNITITQGLAVPTISSFFPPGYQVSFCLVMVLLFAVDTGLYFSVKTNIRSSTRDWKDHKFKWRKDPQDK

SEQ ID NO: 10287 - protein, 506 aa, -Artificial-Sequence; identical to SEQ ID NO: 10244

SEQ ID NO: 10288 - protein, 506 aa, -Artificial-Sequence
MALPVTALLLPLALLLHAARPSYVLTQPPSVSVAPGQTARITCGGNNLGSKSVHWYQQPPGQAPVVVVYDDSDRPSGIPERFSGSNSGNTATLTISRVEAGDEAVYYCQVWDSSSDHVVFGGGTKLTVLGGGGSGGGGSGGGGSQLQLQESGPGLVKPSETLSLTCTVSGGSISSGSYIWGWIRQPPGKGLEWIGSIYYSGITYYNPSLKSRVTISVDTSKNQFSLKLSSVTAADTAVYYCARHDGAVAGLFDYWGQGTLVTVSSATRGMRTEDLPKAVVFLEPQWYRVLEKDSVTLKCQGAYSPEDNSTQWFHNESLISSQASSYFIDAATVDDSGEYRCQTNLSTLSDPVQLEVHIGWLLLQAPRWVFKEEDPIHLRCHSWKNTALHKVTYLQNGKGRKYFHHNSDFYIPKATLKDSGSYFCRGLVGSKNVSSETVNITITQGLAVPTISSFFPPGYQVSFCLVMVLLFAVDTGLYFSVKTNIRSSTRDWKDHKFKWRKDPQDK

SEQ ID NO: 10289 - protein, 506 aa, -Artificial-Sequence
MALPVTALLLPLALLLHAARPSYVLTQPPSVSVAPGQTARITCGGNNLGSKSVHWYQQPPGQAPVVVVYDDSDRPSGIPERFSGSNSGNTATLTISRVEAGDEAVYYCQVWDSSSDHVVFGGGTKLTVLGGGGSGGGGSGGGGSQLQLQESGPGLVKPSETLSLTCTVSGGSISSGSYFWGWIRQPPGKGLEWIGSIYYSGITYYNPSLKSRVTISVDTSKNQFSLKLSSVTAADTAVYYCARHDGAMAGLFDYWGQGTLVTVSSATRGMRTEDLPKAVVFLEPQWYRVLEKDSVTLKCQGAYSPEDNSTQWFHNESLISSQASSYFIDAATVDDSGEYRCQTNLSTLSDPVQLEVHIGWLLLQAPRWVFKEEDPIHLRCHSWKNTALHKVTYLQNGKGRKYFHHNSDFYIPKATLKDSGSYFCRGLVGSKNVSSETVNITITQGLAVPTISSFFPPGYQVSFCLVMVLLFAVDTGLYFSVKTNIRSSTRDWKDHKFKWRKDPQDK

SEQ ID NO: 10290 - protein, 506 aa, -Artificial-Sequence
MALPVTALLLPLALLLHAARPSYVLTQPPSVSVAPGQTARITCGGNNLGSKSVHWYQQPPGQAPVVVVYDDSDRPSGIPERFSGSNSGNTATLTISRVEAGDEAVYYCQVWDSSSDHVVFGGGTKLTVLGGGGSGGGGSGGGGSQLQLQESGPGLVKPSETLSLTCTVSGGSISSGSYFWGWIRQPPGKGLEWIGSIYYSGSTYYNPSLKSRVTISVDTSKNQFSLKLSSVTAADTAVYYCARHDGAVAGLFDYWGQGTLVTVSSATRGMRTEDLPKAVVFLEPQWYRVLEKDSVTLKCQGAYSPEDNSTQWFHNESLISSQASSYFIDAATVDDSGEYRCQTNLSTLSDPVQLEVHIGWLLLQAPRWVFKEEDPIHLRCHSWKNTALHKVTYLQNGKGRKYFHHNSDFYIPKATLKDSGSYFCRGLVGSKNVSSETVNITITQGLAVPTISSFFPPGYQVSFCLVMVLLFAVDTGLYFSVKTNIRSSTRDWKDHKFKWRKDPQDK

SEQ ID NO: 10291 - protein, 506 aa, -Artificial-Sequence
MALPVTALLLPLALLLHAARPSYVLTQPPSVSVAPGQTARITCGGNNLGSKSVHWYQQPPGQAPVVVVYDDSDRPSGIPERFSGSNSGNTATLTISRVEAGDEAVYYCQVWDSSSDHVVFGGGTKLTVLGGGGSGGGGSGGGGSQLQLQESGPGLVKPSETLSLTCTVSGGSISSGSYFWGWIRQPPGKGLEWIGSIYYSGISYYNPSLKSRVTISVDTSKNQFSLKLSSVTAADTAVYYCARHDGAVAGLFDYWGQGTLVTVSSATRGMRTEDLPKAVVFLEPQWYRVLEKDSVTLKCQGAYSPEDNSTQWFHNESLISSQASSYFIDAATVDDSGEYRCQTNLSTLSDPVQLEVHIGWLLLQAPRWVFKEEDPIHLRCHSWKNTALHKVTYLQNGKGRKYFHHNSDFYIPKATLKDSGSYFCRGLVGSKNVSSETVNITITQGLAVPTISSFFPPGYQVSFCLVMVLLFAVDTGLYFSVKTNIRSSTRDWKDHKFKWRKDPQDK

SEQ ID NO: 10292 - protein, 506 aa, -Artificial-Sequence
MALPVTALLLPLALLLHAARPSYVLTQPPSVSVAPGQTARITCGGNNLGSKSVHWYQQPPGQAPVVVVYDDSDRPSGIPERFSGSNSGNTATLTISRVEAGDEAVYYCQVWDSSSDHVVFGGGTKLTVLGGGGSGGGGSGGGGSQLQLQESGPGLVKPSETLSLTCTVSGGSISSGSYFWGWIRQPPGKGLEWIGSIYYSGITYYNPGLKSRVTISVDTSKNQFSLKLSSVTAADTAVYYCARHDGAVAGLFDYWGQGTLVTVSSATRGMRTEDLPKAVVFLEPQWYRVLEKDSVTLKCQGAYSPEDNSTQWFHNESLISSQASSYFIDAATVDDSGEYRCQTNLSTLSDPVQLEVHIGWLLLQAPRWVFKEEDPIHLRCHSWKNTALHKVTYLQNGKGRKYFHHNSDFYIPKATLKDSGSYFCRGLVGSKNVSSETVNITITQGLAVPTISSFFPPGYQVSFCLVMVLLFAVDTGLYFSVKTNIRSSTRDWKDHKFKWRKDPQDK

SEQ ID NO: 10293 - protein, 506 aa, -Artificial-Sequence
MALPVTALLLPLALLLHAARPSYVLTQPPSVSVAPGQTARITCGGNNLGSKSVHWYQQPPGQAPVVVVYDDSDRPSGIPERFSGSNSGNTATLTISRVEAGDEAVYYCQVWDSSSDHVVFGGGTKLTVLGGGGSGGGGSGGGGSQLQLQESGPGLVKPSETLSLTCTVSGGSISSGSYFWGWIRQPPGKGLEWIGSIYYSGITYYNPTLKSRVTISVDTSKNQFSLKLSSVTAADTAVYYCARHDGAVAGLFDYWGQGTLVTVSSATRGMRTEDLPKAVVFLEPQWYRVLEKDSVTLKCQGAYSPEDNSTQWFHNESLISSQASSYFIDAATVDDSGEYRCQTNLSTLSDPVQLEVHIGWLLLQAPRWVFKEEDPIHLRCHSWKNTALHKVTYLQNGKGRKYFHHNSDFYIPKATLKDSGSYFCRGLVGSKNVSSETVNITITQGLAVPTISSFFPPGYQVSFCLVMVLLFAVDTGLYFSVKTNIRSSTRDWKDHKFKWRKDPQDK

SEQ ID NO: 10294 - protein, 506 aa, -Artificial-Sequence; identical to SEQ ID NO: 10245

SEQ ID NO: 10295 - protein, 506 aa, -Artificial-Sequence
MALPVTALLLPLALLLHAARPSYVLTQPPSVSVAPGQTARITCGGNNIGGKSVHWYQQPPGQAPVVVVYDDSDRPSGIPERFSGSNSGNTATLTISRVEAGDEAVYYCQVWDSSSDHVVFGGGTKLTVLGGGGSGGGGSGGGGSQLQLQESGPGLVKPSETLSLTCTVSGGSISSGSYIWGWIRQPPGKGLEWIGSIYYSGITYYNPSLKSRVTISVDTSKNQFSLKLSSVTAADTAVYYCARHDGAVAGLFDYWGQGTLVTVSSATRGMRTEDLPKAVVFLEPQWYRVLEKDSVTLKCQGAYSPEDNSTQWFHNESLISSQASSYFIDAATVDDSGEYRCQTNLSTLSDPVQLEVHIGWLLLQAPRWVFKEEDPIHLRCHSWKNTALHKVTYLQNGKGRKYFHHNSDFYIPKATLKDSGSYFCRGLVGSKNVSSETVNITITQGLAVPTISSFFPPGYQVSFCLVMVLLFAVDTGLYFSVKTNIRSSTRDWKDHKFKWRKDPQDK

SEQ ID NO: 10296 - protein, 506 aa, -Artificial-Sequence
MALPVTALLLPLALLLHAARPSYVLTQPPSVSVAPGQTARITCGGNNIGGKSVHWYQQPPGQAPVVVVYDDSDRPSGIPERFSGSNSGNTATLTISRVEAGDEAVYYCQVWDSSSDHVVFGGGTKLTVLGGGGSGGGGSGGGGSQLQLQESGPGLVKPSETLSLTCTVSGGSISSGSYFWGWIRQPPGKGLEWIGSIYYSGITYYNPSLKSRVTISVDTSKNQFSLKLSSVTAADTAVYYCARHDGAMAGLFDYWGQGTLVTVSSATRGMRTEDLPKAVVFLEPQWYRVLEKDSVTLKCQGAYSPEDNSTQWFHNESLISSQASSYFIDAATVDDSGEYRCQTNLSTLSDPVQLEVHIGWLLLQAPRWVFKEEDPIHLRCHSWKNTALHKVTYLQNGKGRKYFHHNSDFYIPKATLKDSGSYFCRGLVGSKNVSSETVNITITQGLAVPTISSFFPPGYQVSFCLVMVLLFAVDTGLYFSVKTNIRSSTRDWKDHKFKWRKDPQDK

SEQ ID NO: 10297 - protein, 506 aa, -Artificial-Sequence
MALPVTALLLPLALLLHAARPSYVLTQPPSVSVAPGQTARITCGGNNIGGKSVHWYQQPPGQAPVVVVYDDSDRPSGIPERFSGSNSGNTATLTISRVEAGDEAVYYCQVWDSSSDHVVFGGGTKLTVLGGGGSGGGGSGGGGSQLQLQESGPGLVKPSETLSLTCTVSGGSISSGSYFWGWIRQPPGKGLEWIGSIYYSGSTYYNPSLKSRVTISVDTSKNQFSLKLSSVTAADTAVYYCARHDGAVAGLFDYWGQGTLVTVSSATRGMRTEDLPKAVVFLEPQWYRVLEKDSVTLKCQGAYSPEDNSTQWFHNESLISSQASSYFIDAATVDDSGEYRCQTNLSTLSDPVQLEVHIGWLLLQAPRWVFKEEDPIHLRCHSWKNTALHKVTYLQNGKGRKYFHHNSDFYIPKATLKDSGSYFCRGLVGSKNVSSETVNITITQGLAVPTISSFFPPGYQVSFCLVMVLLFAVDTGLYFSVKTNIRSSTRDWKDHKFKWRKDPQDK

SEQ ID NO: 10298 - protein, 506 aa, -Artificial-Sequence
MALPVTALLLPLALLLHAARPSYVLTQPPSVSVAPGQTARITCGGNNIGGKSVHWYQQPPGQAPVVVVYDDSDRPSGIPERFSGSNSGNTATLTISRVEAGDEAVYYCQVWDSSSDHVVFGGGTKLTVLGGGGSGGGGSGGGGSQLQLQESGPGLVKPSETLSLTCTVSGGSISSGSYFWGWIRQPPGKGLEWIGSIYYSGISYYNPSLKSRVTISVDTSKNQFSLKLSSVTAADTAVYYCARHDGAVAGLFDYWGQGTLVTVSSATRGMRTEDLPKAVVFLEPQWYRVLEKDSVTLKCQGAYSPEDNSTQWFHNESLISSQASSYFIDAATVDDSGEYRCQTNLSTLSDPVQLEVHIGWLLLQAPRWVFKEEDPIHLRCHSWKNTALHKVTYLQNGKGRKYFHHNSDFYIPKATLKDSGSYFCRGLVGSKNVSSETVNITITQGLAVPTISSFFPPGYQVSFCLVMVLLFAVDTGLYFSVKTNIRSSTRDWKDHKFKWRKDPQDK

SEQ ID NO: 10299 - protein, 506 aa, -Artificial-Sequence
MALPVTALLLPLALLLHAARPSYVLTQPPSVSVAPGQTARITCGGNNIGGKSVHWYQQPPGQAPVVVVYDDSDRPSGIPERFSGSNSGNTATLTISRVEAGDEAVYYCQVWDSSSDHVVFGGGTKLTVLGGGGSGGGGSGGGGSQLQLQESGPGLVKPSETLSLTCTVSGGSISSGSYFWGWIRQPPGKGLEWIGSIYYSGITYYNPGLKSRVTISVDTSKNQFSLKLSSVTAADTAVYYCARHDGAVAGLFDYWGQGTLVTVSSATRGMRTEDLPKAVVFLEPQWYRVLEKDSVTLKCQGAYSPEDNSTQWFHNESLISSQASSYFIDAATVDDSGEYRCQTNLSTLSDPVQLEVHIGWLLLQAPRWVFKEEDPIHLRCHSWKNTALHKVTYLQNGKGRKYFHHNSDFYIPKATLKDSGSYFCRGLVGSKNVSSETVNITITQGLAVPTISSFFPPGYQVSFCLVMVLLFAVDTGLYFSVKTNIRSSTRDWKDHKFKWRKDPQDK

SEQ ID NO: 10300 - protein, 506 aa, -Artificial-Sequence
MALPVTALLLPLALLLHAARPSYVLTQPPSVSVAPGQTARITCGGNNIGGKSVHWYQQPPGQAPVVVVYDDSDRPSGIPERFSGSNSGNTATLTISRVEAGDEAVYYCQVWDSSSDHVVFGGGTKLTVLGGGGSGGGGSGGGGSQLQLQESGPGLVKPSETLSLTCTVSGGSISSGSYFWGWIRQPPGKGLEWIGSIYYSGITYYNPTLKSRVTISVDTSKNQFSLKLSSVTAADTAVYYCARHDGAVAGLFDYWGQGTLVTVSSATRGMRTEDLPKAVVFLEPQWYRVLEKDSVTLKCQGAYSPEDNSTQWFHNESLISSQASSYFIDAATVDDSGEYRCQTNLSTLSDPVQLEVHIGWLLLQAPRWVFKEEDPIHLRCHSWKNTALHKVTYLQNGKGRKYFHHNSDFYIPKATLKDSGSYFCRGLVGSKNVSSETVNITITQGLAVPTISSFFPPGYQVSFCLVMVLLFAVDTGLYFSVKTNIRSSTRDWKDHKFKWRKDPQDK

SEQ ID NO: 10301 - protein, 506 aa, -Artificial-Sequence; identical to SEQ ID NO: 10280

SEQ ID NO: 10302 - protein, 506 aa, -Artificial-Sequence
MALPVTALLLPLALLLHAARPSYVLTQPPSVSVAPGQTARITCGGNNIGSKTVHWYQQPPGQAPVVVVYDDSDRPSGIPERFSGSNSGNTATLTISRVEAGDEAVYYCQVWDSSSDHVVFGGGTKLTVLGGGGSGGGGSGGGGSQLQLQESGPGLVKPSETLSLTCTVSGGSISSGSYIWGWIRQPPGKGLEWIGSIYYSGITYYNPSLKSRVTISVDTSKNQFSLKLSSVTAADTAVYYCARHDGAVAGLFDYWGQGTLVTVSSATRGMRTEDLPKAVVFLEPQWYRVLEKDSVTLKCQGAYSPEDNSTQWFHNESLISSQASSYFIDAATVDDSGEYRCQTNLSTLSDPVQLEVHIGWLLLQAPRWVFKEEDPIHLRCHSWKNTALHKVTYLQNGKGRKYFHHNSDFYIPKATLKDSGSYFCRGLVGSKNVSSETVNITITQGLAVPTISSFFPPGYQVSFCLVMVLLFAVDTGLYFSVKTNIRSSTRDWKDHKFKWRKDPQDK

SEQ ID NO: 10303 - protein, 506 aa, -Artificial-Sequence
MALPVTALLLPLALLLHAARPSYVLTQPPSVSVAPGQTARITCGGNNIGSKTVHWYQQPPGQAPVVVVYDDSDRPSGIPERFSGSNSGNTATLTISRVEAGDEAVYYCQVWDSSSDHVVFGGGTKLTVLGGGGSGGGGSGGGGSQLQLQESGPGLVKPSETLSLTCTVSGGSISSGSYFWGWIRQPPGKGLEWIGSIYYSGITYYNPSLKSRVTISVDTSKNQFSLKLSSVTAADTAVYYCARHDGAMAGLFDYWGQGTLVTVSSATRGMRTEDLPKAVVFLEPQWYRVLEKDSVTLKCQGAYSPEDNSTQWFHNESLISSQASSYFIDAATVDDSGEYRCQTNLSTLSDPVQLEVHIGWLLLQAPRWVFKEEDPIHLRCHSWKNTALHKVTYLQNGKGRKYFHHNSDFYIPKATLKDSGSYFCRGLVGSKNVSSETVNITITQGLAVPTISSFFPPGYQVSFCLVMVLLFAVDTGLYFSVKTNIRSSTRDWKDHKFKWRKDPQDK

SEQ ID NO: 10304 - protein, 506 aa, -Artificial-Sequence
MALPVTALLLPLALLLHAARPSYVLTQPPSVSVAPGQTARITCGGNNIGSKTVHWYQQPPGQAPVVVVYDDSDRPSGIPERFSGSNSGNTATLTISRVEAGDEAVYYCQVWDSSSDHVVFGGGTKLTVLGGGGSGGGGSGGGGSQLQLQESGPGLVKPSETLSLTCTVSGGSISSGSYFWGWIRQPPGKGLEWIGSIYYSGSTYYNPSLKSRVTISVDTSKNQFSLKLSSVTAADTAVYYCARHDGAVAGLFDYWGQGTLVTVSSATRGMRTEDLPKAVVFLEPQWYRVLEKDSVTLKCQGAYSPEDNSTQWFHNESLISSQASSYFIDAATVDDSGEYRCQTNLSTLSDPVQLEVHIGWLLLQAPRWVFKEEDPIHLRCHSWKNTALHKVTYLQNGKGRKYFHHNSDFYIPKATLKDSGSYFCRGLVGSKNVSSETVNITITQGLAVPTISSFFPPGYQVSFCLVMVLLFAVDTGLYFSVKTNIRSSTRDWKDHKFKWRKDPQDK

SEQ ID NO: 10305 - protein, 506 aa, -Artificial-Sequence
MALPVTALLLPLALLLHAARPSYVLTQPPSVSVAPGQTARITCGGNNIGSKTVHWYQQPPGQAPVVVVYDDSDRPSGIPERFSGSNSGNTATLTISRVEAGDEAVYYCQVWDSSSDHVVFGGGTKLTVLGGGGSGGGGSGGGGSQLQLQESGPGLVKPSETLSLTCTVSGGSISSGSYFWGWIRQPPGKGLEWIGSIYYSGISYYNPSLKSRVTISVDTSKNQFSLKLSSVTAADTAVYYCARHDGAVAGLFDYWGQGTLVTVSSATRGMRTEDLPKAVVFLEPQWYRVLEKDSVTLKCQGAYSPEDNSTQWFHNESLISSQASSYFIDAATVDDSGEYRCQTNLSTLSDPVQLEVHIGWLLLQAPRWVFKEEDPIHLRCHSWKNTALHKVTYLQNGKGRKYFHHNSDFYIPKATLKDSGSYFCRGLVGSKNVSSETVNITITQGLAVPTISSFFPPGYQVSFCLVMVLLFAVDTGLYFSVKTNIRSSTRDWKDHKFKWRKDPQDK

SEQ ID NO: 10306 - protein, 506 aa, -Artificial-Sequence
MALPVTALLLPLALLLHAARPSYVLTQPPSVSVAPGQTARITCGGNNIGSKTVHWYQQPPGQAPVVVVYDDSDRPSGIPERFSGSNSGNTATLTISRVEAGDEAVYYCQVWDSSSDHVVFGGGTKLTVLGGGGSGGGGSGGGGSQLQLQESGPGLVKPSETLSLTCTVSGGSISSGSYFWGWIRQPPGKGLEWIGSIYYSGITYYNPGLKSRVTISVDTSKNQFSLKLSSVTAADTAVYYCARHDGAVAGLFDYWGQGTLVTVSSATRGMRTEDLPKAVVFLEPQWYRVLEKDSVTLKCQGAYSPEDNSTQWFHNESLISSQASSYFIDAATVDDSGEYRCQTNLSTLSDPVQLEVHIGWLLLQAPRWVFKEEDPIHLRCHSWKNTALHKVTYLQNGKGRKYFHHNSDFYIPKATLKDSGSYFCRGLVGSKNVSSETVNITITQGLAVPTISSFFPPGYQVSFCLVMVLLFAVDTGLYFSVKTNIRSSTRDWKDHKFKWRKDPQDK

SEQ ID NO: 10307 - protein, 506 aa, -Artificial-Sequence
MALPVTALLLPLALLLHAARPSYVLTQPPSVSVAPGQTARITCGGNNIGSKTVHWYQQPPGQAPVVVVYDDSDRPSGIPERFSGSNSGNTATLTISRVEAGDEAVYYCQVWDSSSDHVVFGGGTKLTVLGGGGSGGGGSGGGGSQLQLQESGPGLVKPSETLSLTCTVSGGSISSGSYFWGWIRQPPGKGLEWIGSIYYSGITYYNPTLKSRVTISVDTSKNQFSLKLSSVTAADTAVYYCARHDGAVAGLFDYWGQGTLVTVSSATRGMRTEDLPKAVVFLEPQWYRVLEKDSVTLKCQGAYSPEDNSTQWFHNESLISSQASSYFIDAATVDDSGEYRCQTNLSTLSDPVQLEVHIGWLLLQAPRWVFKEEDPIHLRCHSWKNTALHKVTYLQNGKGRKYFHHNSDFYIPKATLKDSGSYFCRGLVGSKNVSSETVNITITQGLAVPTISSFFPPGYQVSFCLVMVLLFAVDTGLYFSVKTNIRSSTRDWKDHKFKWRKDPQDK

SEQ ID NO: 10308 - protein, 499 aa, -Artificial-Sequence; identical to SEQ ID NO: 10266

SEQ ID NO: 10309 - protein, 499 aa, -Artificial-Sequence
MALPVTALLLPLALLLHAARPDIQMTQSPSSLSASVGDRVTITCKASQDVGTAVDWYQQKPGKAPKLLIYWASTRHTGVPSRFSGSGSGTDFTLTISSLQPEDFATYYCQQYNSYPLTFGQGTKVEIKRGGGGSGGGGSGGGGSQVQLVQSGAEVKKPGESVKVSCKASGYTFTEYTIHWVRQAPGQGLEWMGNINPNNGGTTYNQKFEDRVTITADKSTSTAYMELSSLRSEDTAVYYCARGWNFDYWGQGTTVTVSSTRGMRTEDLPKAVVFLEPQWYRVLEKDSVTLKCQGAYSPEDNSTQWFHNESLISSQASSYFIDAATVDDSGEYRCQTNLSTLSDPVQLEVHIGWLLLQAPRWVFKEEDPIHLRCHSWKNTALHKVTYLQNGKGRKYFHHNSDFYIPKATLKDSGSYFCRGLVGSKNVSSETVNITITQGLAVPTISSFFPPGYQVSFCLVMVLLFAVDTGLYFSVKTNIRSSTRDWKDHKFKWRKDPQDK

SEQ ID NO: 10310 - protein, 499 aa, -Artificial-Sequence; identical to SEQ ID NO: 10265

SEQ ID NO: 10311 - protein, 499 aa, -Artificial-Sequence
MALPVTALLLPLALLLHAARPDIVMTQSHKFMSTSVGDRVSIICKASQDVGTAVDWYQQKPGQSPKLLIYWASTRHTGVPDRFTGSGSGTDFTLAITNVQSEDLADYFCQQYNSYPLTFGAGTKLEIKRGGGGSGGGGSGGGGSQVQLVQSGAEVKKPGESVKVSCKASGYTFTEYTIHWVRQAPGQGLEWMGNINPNNGGTTYNQKFEDRVTITADKSTSTAYMELSSLRSEDTAVYYCARGWNFDYWGQGTTVTVSSTRGMRTEDLPKAVVFLEPQWYRVLEKDSVTLKCQGAYSPEDNSTQWFHNESLISSQASSYFIDAATVDDSGEYRCQTNLSTLSDPVQLEVHIGWLLLQAPRWVFKEEDPIHLRCHSWKNTALHKVTYLQNGKGRKYFHHNSDFYIPKATLKDSGSYFCRGLVGSKNVSSETVNITITQGLAVPTISSFFPPGYQVSFCLVMVLLFAVDTGLYFSVKTNIRSSTRDWKDHKFKWRKDPQDK

SEQ ID NO: 10312 - protein, 501 aa, -Artificial-Sequence
MALPVTALLLPLALLLHAARPDIQMTQSPSSLSASVGDRVTITCKASQDVGTAVDWYQQKPGKAPKLLISWASTRHTGVPSRFSGSGSGTDFTLTISSLQPEDFATYFCQQYNSYPLTFGQGTKVEIKRTVGGGGSGGGGSGGGGSEVQLVESGGGLVQPGGSLRLSCAASGYTFTEYTIHWVRQAPGKGLEWVANINPNNGGTTYNQKFEDRFTISRDNSKNTLYLQMNSLRAEDTAVYYCARGWNFDYWGQGTLVTVSSTRGMRTEDLPKAVVFLEPQWYRVLEKDSVTLKCQGAYSPEDNSTQWFHNESLISSQASSYFIDAATVDDSGEYRCQTNLSTLSDPVQLEVHIGWLLLQAPRWVFKEEDPIHLRCHSWKNTALHKVTYLQNGKGRKYFHHNSDFYIPKATLKDSGSYFCRGLVGSKNVSSETVNITITQGLAVPTISSFFPPGYQVSFCLVMVLLFAVDTGLYFSVKTNIRSSTRDWKDHKFKWRKDPQDK

SEQ ID NO: 10313 - protein, 501 aa, -Artificial-Sequence
MALPVTALLLPLALLLHAARPDIQMTQSPSSLSASVGDRVTITCKASQDVGTAVDWYQQKPGKAPKLLISWASTRHTGVPSRFSGSGSGTDFTLTISSLQPEDFATYFCQQYNSYPLTFGQGTKVEIKRTVGGGGSGGGGSGGGGSEVQLQQSGPELVKPGTSVRISCKTSGYTFTEYTIHWVKQSHGKSLEWIGNINPNNGGTTYNQKFEDKATLTVDKSSSTAYMELRSLTSEDSAVYYCAAGWNFDYWGQGTTLTVSSTRGMRTEDLPKAVVFLEPQWYRVLEKDSVTLKCQGAYSPEDNSTQWFHNESLISSQASSYFIDAATVDDSGEYRCQTNLSTLSDPVQLEVHIGWLLLQAPRWVFKEEDPIHLRCHSWKNTALHKVTYLQNGKGRKYFHHNSDFYIPKATLKDSGSYFCRGLVGSKNVSSETVNITITQGLAVPTISSFFPPGYQVSFCLVMVLLFAVDTGLYFSVKTNIRSSTRDWKDHKFKWRKDPQDK

SEQ ID NO: 10314 - protein, 501 aa, -Artificial-Sequence; identical to SEQ ID NO: 10267

SEQ ID NO: 10315 - protein, 505 aa, -Artificial-Sequence; identical to SEQ ID NO: 10274

SEQ ID NO: 10316 - protein, 504 aa, -Artificial-Sequence
MALPVTALLLPLALLLHAARPDIQMTQSPSSLSASVGDRVTITCKSSQSLLYSSNQKNYLAWFQQKPGKAPKLLIYWASTRESGVPSRFSGSGSGTDFTLTISSLQPEDFATYFCHQYLSSYTFGQGTKVEIKRGGGGSGGGGSGGGGSEVQLVESGGGLVQPGGSLRLSCAASGFTFTTYWMHWVRQAPGKGLEWVGYIRPSTGYTEYNQKFKDRFTISADTSKNTAYLQMNSLRAEDTAVYYCARSRWLLDYWGQGTLVTVSTRGMRTEDLPKAVVFLEPQWYRVLEKDSVTLKCQGAYSPEDNSTQWFHNESLISSQASSYFIDAATVDDSGEYRCQTNLSTLSDPVQLEVHIGWLLLQAPRWVFKEEDPIHLRCHSWKNTALHKVTYLQNGKGRKYFHHNSDFYIPKATLKDSGSYFCRGLVGSKNVSSETVNITITQGLAVPTISSFFPPGYQVSFCLVMVLLFAVDTGLYFSVKTNIRSSTRDWKDHKFKWRKDPQDK

SEQ ID NO: 10317 - protein, 502 aa, -Artificial-Sequence
MALPVTALLLPLALLLHAARPDIQMTQSPSSLSASVGDRVTITCKSSQSLLYSSNQKNYLAWFQQKPGKAPKLLIYWASTRESGVPSRFSGSGSGTDFTLTISSLQPEDFATYFCHQYLSSYTFGQGTKVEIKRGGGGSGGGGSGGGGSDIQMTQSPSSLSASVGDRVTITCKSSQSLLYSSNQKNYLAWFQQKPGKAPKLLIYWASTRESGVPSRFSGSGSGTDFTLTISSLQPEDFATYFCHQYLSSYTFGQGTKVEIKRTRGMRTEDLPKAVVFLEPQWYRVLEKDSVTLKCQGAYSPEDNSTQWFHNESLISSQASSYFIDAATVDDSGEYRCQTNLSTLSDPVQLEVHIGWLLLQAPRWVFKEEDPIHLRCHSWKNTALHKVTYLQNGKGRKYFHHNSDFYIPKATLKDSGSYFCRGLVGSKNVSSETVNITITQGLAVPTISSFFPPGYQVSFCLVMVLLFAVDTGLYFSVKTNIRSSTRDWKDHKFKWRKDPQDK

SEQ ID NO: 10318 - protein, 501 aa, -Artificial-Sequence; identical to SEQ ID NO: 10277

SEQ ID NO: 10319 - protein, 501 aa, -Artificial-Sequence; identical to SEQ ID NO: 5299

SEQ ID NO: 10320 - protein, 501 aa, -Artificial-Sequence
MALPVTALLLPLALLLHAARPDIQMTQSPSSLSASVGDRVTITCRASQDISSYLNWYQQKPGKAPKLLIYYTSRLHSGVPSRFSGSGSGTDFTLTISSLQPEDFATYYCQQGNTLPYTFGQGTKVEIKRGGGGSGGGGSGGGGSEVQLVESGGGLVQPGGSLRLSCAASGYTFSDYFMSWVRQAPGKGLEWVATISNGGTYTYYPDSVKGRFTISRDNSKNTLYLQMNSLRAEDTAVYYCARFDGYIFDYWGQGTLVTVSSTRGMRTEDLPKAVVFLEPQWYRVLEKDSVTLKCQGAYSPEDNSTQWFHNESLISSQASSYFIDAATVDDSGEYRCQTNLSTLSDPVQLEVHIGWLLLQAPRWVFKEEDPIHLRCHSWKNTALHKVTYLQNGKGRKYFHHNSDFYIPKATLKDSGSYFCRGLVGSKNVSSETVNITITQGLAVPTISSFFPPGYQVSFCLVMVLLFAVDTGLYFSVKTNIRSSTRDWKDHKFKWRKDPQDK

SEQ ID NO: 10321 - protein, 501 aa, -Artificial-Sequence; identical to SEQ ID NO: 10278

SEQ ID NO: 10322 - protein, 501 aa, -Artificial-Sequence
MALPVTALLLPLALLLHAARPDIQMTQSPSSLSASVGDRVTITCRASQDISNYLNWYQQKPGKAPKLLIYYTSRLHSGVPSRFSGSGSGTDFTLTISSLQPEDFATYYCQQGNTLPWTFGQGTKVEIKRGGGGSGGGGSGGGGSEVQLVESGGGLVQPGGSLRLSCAASGYTFSDYFMSWVRQAPGKGLEWVATISNGGTYTYYPDSVKGRFTISRDNSKNTLYLQMNSLRAEDTAVYYCARFDGYIFDYWGQGTLVTVSSTRGMRTEDLPKAVVFLEPQWYRVLEKDSVTLKCQGAYSPEDNSTQWFHNESLISSQASSYFIDAATVDDSGEYRCQTNLSTLSDPVQLEVHIGWLLLQAPRWVFKEEDPIHLRCHSWKNTALHKVTYLQNGKGRKYFHHNSDFYIPKATLKDSGSYFCRGLVGSKNVSSETVNITITQGLAVPTISSFFPPGYQVSFCLVMVLLFAVDTGLYFSVKTNIRSSTRDWKDHKFKWRKDPQDK

SEQ ID NO: 10323 - protein, 501 aa, -Artificial-Sequence; identical to SEQ ID NO: 10279

SEQ ID NO: 10324 - protein, 668 aa, -Artificial-Sequence
MALPVTALLLPLALLLHAARPACEVQLLESGGGLIQPGGSLRLSCAASGFTFSSHAMTWVRQAPGKGLEWVSAISGSGDYTHYADSVKGRFTISRDNSKNTVYLQMNSLRAEDSAVYYCAKDEDGGSLLGHRGQGTLVTVSSGTGGGGSGGGGSGGGGSEFINIYNAEPANPSEKNSPEFDIVMTQSPATLSLSPGERATLSCRSSKSLQNVNGNTYLYWFQQKPGQSPQLLIYRMSNLNSGVPDRFSGSGSGTEFTLTISSLEPEDFAVYYCMQHLEYPITFGAGTKLEIKGGGGSGGGGSGGGGSEVQLVESGGGLVKPGGSLKLSCAASGYTFTSYVMHWVRQAPGKGLEWIGYINPYNDGTKYNEKFQGRVTISSDKSISTAYMELSSLRSEDTAMYYCARGTYYYGTRVFDYWGQGTLVTVSSTRGMRTEDLPKAVVFLEPQWYRVLEKDSVTLKCQGAYSPEDNSTQWFHNESLISSQASSYFIDAATVDDSGEYRCQTNLSTLSDPVQLEVHIGWLLLQAPRWVFKEEDPIHLRCHSWKNTALHKVTYLQNGKGRKYFHHNSDFYIPKATLKDSGSYFCRGLVGSKNVSSETVNITITQGLAVPTISSFFPPGYQVSFCLVMVLLFAVDTGLYFSVKTNIRSSTRDWKDHKFKWRKDPQDK

SEQ ID NO: 10325 - protein, 642 aa, -Artificial-Sequence
MALPVTALLLPLALLLHAARPEVQLVESGGGLVQAGGSLRLSCAASGRTFSMGWFRQAPGKEREFVAAITYSGGSPYYADSVKGRFTISRDNAKNTVYLQMNSLKPEDTAVYYCAANPTYGSDWNAENWGQGTQVTVSSGSGGGGSGGGGSGGGGSFEDIQMTQSPSSLSASVGDRVTITCKASDHINNWLAWYQQKPGQAPKLLIYGATTLETGVPSRFSGSGSGTDYTLTISSLQPEDFATYYCQQSWNTPWTFGQGTKLEIKRGGGGSGGGGSGGGGSQVQLQQPGAELVKPGASVKMSCKASGYAFSSYWINWMKQKPGQGLEWIGQIYPGDGDTNYNGKFKGRATLTADTSSSTAYMQLSSLTSEDSAVYFCARSITTVVGCAMDYWGQGTSVTVSSTRGMRTEDLPKAVVFLEPQWYRVLEKDSVTLKCQGAYSPEDNSTQWFHNESLISSQASSYFIDAATVDDSGEYRCQTNLSTLSDPVQLEVHIGWLLLQAPRWVFKEEDPIHLRCHSWKNTALHKVTYLQNGKGRKYFHHNSDFYIPKATLKDSGSYFCRGLVGSKNVSSETVNITITQGLAVPTISSFFPPGYQVSFCLVMVLLFAVDTGLYFSVKTNIRSSTRDWKDHKFKWRKDPQDK

SEQ ID NO: 10326 - protein, 643 aa, -Artificial-Sequence
MALPVTALLLPLALLLHAARPEVQLLESGGGLIQPGGSLRLSCAASGFTFSSHAMTWVRQAPGKGLEWVSAISGSGDYTHYADSVKGRFTISRDNSKNTVYLQMNSLRAEDSAVYYCAKDEDGGSLLGHRGQGTLVTVSSGSGGGGSGGGGSGGGGSFEDIQMTQSPSSLSASVGDRVTITCKASDHINNWLAWYQQKPGQAPKLLIYGATTLETGVPSRFSGSGSGTDYTLTISSLQPEDFATYYCQQSWNTPWTFGQGTKLEIKRGGGGSGGGGSGGGGSQVQLQQPGAELVKPGASVKMSCKASGYAFSSYWINWMKQKPGQGLEWIGQIYPGDGDTNYNGKFKGRATLTADTSSSTAYMQLSSLTSEDSAVYFCARSITTVVGCAMDYWGQGTSVTVSSTRGMRTEDLPKAVVFLEPQWYRVLEKDSVTLKCQGAYSPEDNSTQWFHNESLISSQASSYFIDAATVDDSGEYRCQTNLSTLSDPVQLEVHIGWLLLQAPRWVFKEEDPIHLRCHSWKNTALHKVTYLQNGKGRKYFHHNSDFYIPKATLKDSGSYFCRGLVGSKNVSSETVNITITQGLAVPTISSFFPPGYQVSFCLVMVLLFAVDTGLYFSVKTNIRSSTRDWKDHKFKWRKDPQDK

SEQ ID NO: 10327 - protein, 625 aa, -Artificial-Sequence
MALPVTALLLPLALLLHAARPEVQLVESGGGLVQAGGSLRLSCAASGRTFTMGWFRQAPGKEREFVAAISLSPTLAYYADSVKGRFTISRDNAKNTVVLQMNSLKPEDTALYYCAADRKSVMSIRPDYWGQGTQVTVSSGTDIQMTQSPSSLSASVGDRVTITCKASDHINNWLAWYQQKPGQAPKLLIYGATTLETGVPSRFSGSGSGTDYTLTISSLQPEDFATYYCQQSWNTPWTFGQGTKLEIKRGGGGSGGGGSGGGGSQVQLQQPGAELVKPGASVKMSCKASGYAFSSYWINWMKQKPGQGLEWIGQIYPGDGDTNYNGKFKGRATLTADTSSSTAYMQLSSLTSEDSAVYFCARSITTVVGCAMDYWGQGTSVTVSSTRGMRTEDLPKAVVFLEPQWYRVLEKDSVTLKCQGAYSPEDNSTQWFHNESLISSQASSYFIDAATVDDSGEYRCQTNLSTLSDPVQLEVHIGWLLLQAPRWVFKEEDPIHLRCHSWKNTALHKVTYLQNGKGRKYFHHNSDFYIPKATLKDSGSYFCRGLVGSKNVSSETVNITITQGLAVPTISSFFPPGYQVSFCLVMVLLFAVDTGLYFSVKTNIRSSTRDWKDHKFKWRKDPQDK

SEQ ID NO: 10328 - protein, 753 aa, -Artificial-Sequence
MALPVTALLLPLALLLHAARPEVQLVESGGGLVQAGGSLRLSCAASGRTFSMGWFRQAPGKEREFVAAITYSGGSPYYADSVKGRFTISRDNAKNTVYLQMNSLKPEDTAVYYCAANPTYGSDWNAENWGQGTQVTVSSLESGGGGSFEEVQLVESGGGLVQAGGSLRLSCAASGRTFTMGWFRQAPGKEREFVAAISLSPTLAYYADSVKGRFTISRDNAKNTVVLQMNSLKPEDTALYYCAADRKSVMSIRPDYWGQGTQVTVSSGTDIQMTQSPSSLSASVGDRVTITCKASDHINNWLAWYQQKPGQAPKLLIYGATTLETGVPSRFSGSGSGTDYTLTISSLQPEDFATYYCQQSWNTPWTFGQGTKLEIKRGGGGSGGGGSGGGGSQVQLQQPGAELVKPGASVKMSCKASGYAFSSYWINWMKQKPGQGLEWIGQIYPGDGDTNYNGKFKGRATLTADTSSSTAYMQLSSLTSEDSAVYFCARSITTVVGCAMDYWGQGTSVTVSSTRGMRTEDLPKAVVFLEPQWYRVLEKDSVTLKCQGAYSPEDNSTQWFHNESLISSQASSYFIDAATVDDSGEYRCQTNLSTLSDPVQLEVHIGWLLLQAPRWVFKEEDPIHLRCHSWKNTALHKVTYLQNGKGRKYFHHNSDFYIPKATLKDSGSYFCRGLVGSKNVSSETVNITITQGLAVPTISSFFPPGYQVSFCLVMVLLFAVDTGLYFSVKTNIRSSTRDWKDHKFKWRKDPQDK

SEQ ID NO: 10329 - protein, 500 aa, -Artificial-Sequence
MALPVTALLLPLALLLHAARPGVTQTPKFQVLKTGQSMTLQCAQDMNHEYMSWYRQDPGMGLRLIHYSVAIQTTDQGEVPNGYNVSRSTIEDFPLRLLSAAPSQTSVYFCASSYVGDTGELFFGEGSRLTVGGGGSGGGGSGGGGSQEVTQIPAALSVPEGENLVLNCSFTDSAIYNLQWFRQDPGKGLTSLLLISPWQREQTSGRLNASLDKSSGRSTLYIAASQPGDSATYLCAVRPLLDGTYIPTFGRGTSLIVHPYTRGMRTEDLPKAVVFLEPQWYRVLEKDSVTLKCQGAYSPEDNSTQWFHNESLISSQASSYFIDAATVDDSGEYRCQTNLSTLSDPVQLEVHIGWLLLQAPRWVFKEEDPIHLRCHSWKNTALHKVTYLQNGKGRKYFHHNSDFYIPKATLKDSGSYFCRGLVGSKNVSSETVNITITQGLAVPTISSFFPPGYQVSFCLVMVLLFAVDTGLYFSVKTNIRSSTRDWKDHKFKWRKDPQDK

SEQ ID NO: 10330 - protein, 503 aa, -Artificial-Sequence
MALPVTALLLPLALLLHAARPLVDMKVTQMPRYLIKRMGENVLLECGQDMSHETMYWYRQDPGLGLQLIYISYDVDSNSEGDIPKGYRVSRKKREHFSLILDSAKTNQTSVYFCASSSTNTEVFFGKGTRLTVLGGGGSGGGGSGGGGSDGDSVTQTEGLVTLTEGLPVMLNCTYQTIYSNPFLFWYVQHLNESPRLLLKSFTDNKRTEHQGFHATLHKSSSSFHLQKSSAQLSDSALYYCAFDTNTYKVIFGKGTHLHVLPNTRGMRTEDLPKAVVFLEPQWYRVLEKDSVTLKCQGAYSPEDNSTQWFHNESLISSQASSYFIDAATVDDSGEYRCQTNLSTLSDPVQLEVHIGWLLLQAPRWVFKEEDPIHLRCHSWKNTALHKVTYLQNGKGRKYFHHNSDFYIPKATLKDSGSYFCRGLVGSKNVSSETVNITITQGLAVPTISSFFPPGYQVSFCLVMVLLFAVDTGLYFSVKTNIRSSTRDWKDHKFKWRKDPQDK

SEQ ID NO: 10331 - protein, 577 aa, -Artificial-Sequence
MALPVTALLLPLALLLHAARPMDPDLEIRAAFLRQRNTALRTEVAELEQEVQRLENEVSQYETRYGPLGGGKTRGSGGGGSGGGGSGGGGSFEDIQMTQSPSSLSASVGDRVTITCKASDHINNWLAWYQQKPGQAPKLLIYGATTLETGVPSRFSGSGSGTDYTLTISSLQPEDFATYYCQQSWNTPWTFGQGTKLEIKRGGGGSGGGGSGGGGSQVQLQQPGAELVKPGASVKMSCKASGYAFSSYWINWMKQKPGQGLEWIGQIYPGDGDTNYNGKFKGRATLTADTSSSTAYMQLSSLTSEDSAVYFCARSITTVVGCAMDYWGQGTSVTVSSTRGMRTEDLPKAVVFLEPQWYRVLEKDSVTLKCQGAYSPEDNSTQWFHNESLISSQASSYFIDAATVDDSGEYRCQTNLSTLSDPVQLEVHIGWLLLQAPRWVFKEEDPIHLRCHSWKNTALHKVTYLQNGKGRKYFHHNSDFYIPKATLKDSGSYFCRGLVGSKNVSSETVNITITQGLAVPTISSFFPPGYQVSFCLVMVLLFAVDTGLYFSVKTNIRSSTRDWKDHKFKWRKDPQDK

SEQ ID NO: 10332 - protein, 577 aa, -Artificial-Sequence
MALPVTALLLPLALLLHAARPTRMDPDLEIEAAFLERENTALETRVAELRQRVQRLRNRVSQYRTRYGPLGGGKGSGGGGSGGGGSGGGGSFEDIQMTQSPSSLSASVGDRVTITCKASDHINNWLAWYQQKPGQAPKLLIYGATTLETGVPSRFSGSGSGTDYTLTISSLQPEDFATYYCQQSWNTPWTFGQGTKLEIKRGGGGSGGGGSGGGGSQVQLQQPGAELVKPGASVKMSCKASGYAFSSYWINWMKQKPGQGLEWIGQIYPGDGDTNYNGKFKGRATLTADTSSSTAYMQLSSLTSEDSAVYFCARSITTVVGCAMDYWGQGTSVTVSSTRGMRTEDLPKAVVFLEPQWYRVLEKDSVTLKCQGAYSPEDNSTQWFHNESLISSQASSYFIDAATVDDSGEYRCQTNLSTLSDPVQLEVHIGWLLLQAPRWVFKEEDPIHLRCHSWKNTALHKVTYLQNGKGRKYFHHNSDFYIPKATLKDSGSYFCRGLVGSKNVSSETVNITITQGLAVPTISSFFPPGYQVSFCLVMVLLFAVDTGLYFSVKTNIRSSTRDWKDHKFKWRKDPQDK

SEQ ID NO: 10333 - protein, 641 aa, -Artificial-Sequence
MALPVTALLLPLALLLHAARPGVTQSPTHLIKTRGQQATLRCSPISGHTSVYWYQQALGLGLQFLLWYDEGEERNRGNFPPRFSGRQFPNYSSELNVNALELEDSALYLCASSLGGDELGADGNEQFFGPGTRLTVLEGSGGGGSGGGGSGGGGSFEDIQMTQSPSSLSASVGDRVTITCKASDHINNWLAWYQQKPGQAPKLLIYGATTLETGVPSRFSGSGSGTDYTLTISSLQPEDFATYYCQQSWNTPWTFGQGTKLEIKRGGGGSGGGGSGGGGSQVQLQQPGAELVKPGASVKMSCKASGYAFSSYWINWMKQKPGQGLEWIGQIYPGDGDTNYNGKFKGRATLTADTSSSTAYMQLSSLTSEDSAVYFCARSITTVVGCAMDYWGQGTSVTVSSTRGMRTEDLPKAVVFLEPQWYRVLEKDSVTLKCQGAYSPEDNSTQWFHNESLISSQASSYFIDAATVDDSGEYRCQTNLSTLSDPVQLEVHIGWLLLQAPRWVFKEEDPIHLRCHSWKNTALHKVTYLQNGKGRKYFHHNSDFYIPKATLKDSGSYFCRGLVGSKNVSSETVNITITQGLAVPTISSFFPPGYQVSFCLVMVLLFAVDTGLYFSVKTNIRSSTRDWKDHKFKWRKDPQDK

SEQ ID NO: 10334 - protein, 692 aa, -Artificial-Sequence
MALPVTALLLPLALLLHAARPMGSWFEFYDRLNAIDARLWALGGSEAELAAFEKEIAAFESELQAYKGKGNPEVENLRVHAAAIREWLQAYRHNGGGGSGGGGSGMGSWLEFYHRLNAIDSRLWALGGSEAELAAFEKEIAAFESELQAYKGKGNPEVESLRDHAAHIREWLQAYRHNGGGGSGGGGSGGSGGGGSGGGGSGGGGSFEDIQMTQSPSSLSASVGDRVTITCKASDHINNWLAWYQQKPGQAPKLLIYGATTLETGVPSRFSGSGSGTDYTLTISSLQPEDFATYYCQQSWNTPWTFGQGTKLEIKRGGGGSGGGGSGGGGSQVQLQQPGAELVKPGASVKMSCKASGYAFSSYWINWMKQKPGQGLEWIGQIYPGDGDTNYNGKFKGRATLTADTSSSTAYMQLSSLTSEDSAVYFCARSITTVVGCAMDYWGQGTSVTVSSTRGMRTEDLPKAVVFLEPQWYRVLEKDSVTLKCQGAYSPEDNSTQWFHNESLISSQASSYFIDAATVDDSGEYRCQTNLSTLSDPVQLEVHIGWLLLQAPRWVFKEEDPIHLRCHSWKNTALHKVTYLQNGKGRKYFHHNSDFYIPKATLKDSGSYFCRGLVGSKNVSSETVNITITQGLAVPTISSFFPPGYQVSFCLVMVLLFAVDTGLYFSVKTNIRSSTRDWKDHKFKWRKDPQDK

SEQ ID NO: 10335 - protein, 597 aa, -Artificial-Sequence
MALPVTALLLPLALLLHAARPMGSWSEFWVRLGAIRERLDALGGSEAELAAFEKEIAAFESELQAYKGKGNPEVEKLRYTAATIRRFLQAYRHNGSGGGGSGGGGSGGGGSFEDIQMTQSPSSLSASVGDRVTITCKASDHINNWLAWYQQKPGQAPKLLIYGATTLETGVPSRFSGSGSGTDYTLTISSLQPEDFATYYCQQSWNTPWTFGQGTKLEIKRGGGGSGGGGSGGGGSQVQLQQPGAELVKPGASVKMSCKASGYAFSSYWINWMKQKPGQGLEWIGQIYPGDGDTNYNGKFKGRATLTADTSSSTAYMQLSSLTSEDSAVYFCARSITTVVGCAMDYWGQGTSVTVSSTRGMRTEDLPKAVVFLEPQWYRVLEKDSVTLKCQGAYSPEDNSTQWFHNESLISSQASSYFIDAATVDDSGEYRCQTNLSTLSDPVQLEVHIGWLLLQAPRWVFKEEDPIHLRCHSWKNTALHKVTYLQNGKGRKYFHHNSDFYIPKATLKDSGSYFCRGLVGSKNVSSETVNITITQGLAVPTISSFFPPGYQVSFCLVMVLLFAVDTGLYFSVKTNIRSSTRDWKDHKFKWRKDPQDK

SEQ ID NO: 10336 - protein, 334 aa, -Artificial-Sequence
MALPVTALLLPLALLLHAARPMGSWEEFELRLNAIEERLYALGGSEAELAYFEYVIADFEGNLQRYKGKGNPEVEALYFEADAIFEELVAYRHNTRGMRTEDLPKAVVFLEPQWYRVLEKDSVTLKCQGAYSPEDNSTQWFHNESLISSQASSYFIDAATVDDSGEYRCQTNLSTLSDPVQLEVHIGWLLLQAPRWVFKEEDPIHLRCHSWKNTALHKVTYLQNGKGRKYFHHNSDFYIPKATLKDSGSYFCRGLVGSKNVSSETVNITITQGLAVPTISSFFPPGYQVSFCLVMVLLFAVDTGLYFSVKTNIRSSTRDWKDHKFKWRKDPQDK

SEQ ID NO: 10337 - protein, 716 aa, -Artificial-Sequence
MGWIRGRRSRHSWEMSEFHNYNLDLKKSDFSTRWQKQRCPVVKSKCRENASPFFFCCFIAVAMGIRFIIMVAIWSAVFLNSLFNQEVQIPLTESYCGPCPKNWICYKNNCYQFFDESKNWYESQASCMSQNASLLKVYSKEDQDLLKLVKSYHWMGLVHIPTNGSWQWEDGSILSPNLLTIIEMQKGDCALYASSFKGYIENCSTPNTYICMQRTVGGGGSGGGGSGGGGSEFDIVMTQSPATLSLSPGERATLSCRSSKSLQNVNGNTYLYWFQQKPGQSPQLLIYRMSNLNSGVPDRFSGSGSGTEFTLTISSLEPEDFAVYYCMQHLEYPITFGAGTKLEIKGGGGSGGGGSGGGGSEVQLVESGGGLVKPGGSLKLSCAASGYTFTSYVMHWVRQAPGKGLEWIGYINPYNDGTKYNEKFQGRVTISSDKSISTAYMELSSLRSEDTAMYYCARGTYYYGTRVFDYWGQGTLVTVSSTRRAKRSGSGVKQTLNFDLLKLAGDVESNPGPSRGHMTEYKPTVRLATRDDVPRAVRTLAAAFADYPATRHTVDPDRHIERVTELQELFLTRVGLDIGKVWVADDGAAVAVWTTPESVEAGAVFAEIGPRMAELSGSRLAAQQQMEGLLAPHRPKEPAWFLATVGVSPDHQGKGLGSAVVLPGVEAAERAGVPAFLETSAPRNLPFYERLGFTVTADVEVPEGPRTWCMTRKPGA

SEQ ID NO: 10338 - protein, 964 aa, -Artificial-Sequence
MALPVTALLLPLALLLHAARPEFNAGVTQTPKFQVLKTGQSMTLQCAQDMNHEYMSWYRQDPGMGLRLIHYSVAIQTTDQGEVPNGYNVSRSTIEDFPLRLLSAAPSQTSVYFCASSYLGNTGELFFGEGSRLTVLEDLKNVFPPEVAVFEPSEAEISHTQKATLVCLATGFYPDHVELSWWVNGKEVHSGVSTDPQPLKEQPALNDSRYCLSSRLRVSATFWQNPRNHFRCQVQFYGLSENDEWTQDRAKPVTQIVSAEAWGRADCGSQSFGLLDPKLCYLLDGILFIYGVILTALFLRVKFSRSADAPAYQQGQNQLYNELNLGRREEYDVLDKRRGRDPEMGGKPQRRKNPQEGLYNELQKDKMAEAYSEIGMKGERRRGKGHDGLYQGLSTATKDTYDALHMQALPPRRAKRSGSGATNFSLLKQAGDVEENPGPTSMDWIWRILFLVGAATGAHSFEQEVTQIPAALSVPEGENLVLNCSFTDSAIYNLQWFRQDPGKGLTSLLLIQSSQREQTSGRLNASLDKSSGRSTLYIAASQPGDSATYLCAVRPTSGGSYIPTFGRGTSLIVHPYTREQKLISEEDLGSGIQNPDPAVYQLRDSKSSDKSVCLFTDFDSQTNVSQSKDSDVYITDKCVLDMRSMDFKSNSAVAWSNKSDFACANAFNNSIIPEDTFFPSSDVPCDVKLVEKSFETDTNLNFQNLSVIGFRILLLKVAGFNLLMTLRLWSSRAKRSGSGVKQTLNFDLLKLAGDVESNPGPSRGHMTEYKPTVRLATRDDVPRAVRTLAAAFADYPATRHTVDPDRHIERVTELQELFLTRVGLDIGKVWVADDGAAVAVWTTPESVEAGAVFAEIGPRMAELSGSRLAAQQQMEGLLAPHRPKEPAWFLATVGVSPDHQGKGLGSAVVLPGVEAAERAGVPAFLETSAPRNLPFYERLGFTVTADVEVPEGPRTWCMTRKPGA

SEQ ID NO: 10339 - protein, 1026 aa, -Artificial-Sequence
MALPVTALLLPLALLLHAARPDIQMTQSPSSLSASVGDRVTITCKASDHINNWLAWYQQKPGQAPKLLIYGATTLETGVPSRFSGSGSGTDYTLTISSLQPEDFATYYCQQSWNTPWTFGQGTKLEIKRLEDKQLDADVSPKPTIFLPSIAETKLQKAGTYLCLLEKFFPDVIKIHWQEKKSNTILGSQEGNTMKTNDTYMKFSWLTVPEKSLDKEHRCIVRHENNKNGVDQEIIFPPIKTDVITGSQSFGLLDPKLCYLLDGILFIYGVILTALFLRVKFSRSADAPAYQQGQNQLYNELNLGRREEYDVLDKRRGRDPEMGGKPQRRKNPQEGLYNELQKDKMAEAYSEIGMKGERRRGKGHDGLYQGLSTATKDTYDALHMQALPPRRAKRSGSGATNFSLLKQAGDVEENPGPTSMDWIWRILFLVGAATGAHSFEQVQLQQPGAELVKPGASVKMSCKASGYAFSSYWINWMKQKPGQGLEWIGQIYPGDGDTNYNGKFKGRATLTADTSSSTAYMQLSSLTSEDSAVYFCARSITTVVGCAMDYWGQGTSVTVSSTRSQPHTKPSVFVMKNGTNVACLVKEFYPKDIRINLVSSKKITEFDPAIVISPSGKYNAVKLGKYEDSNSVTCSVQHDNKTVHSTDFGTQSFGLLDPKLCYLLDGILFIYGVILTALFLRVKFSRSADAPAYQQGQNQLYNELNLGRREEYDVLDKRRGRDPEMGGKPQRRKNPQEGLYNELQKDKMAEAYSEIGMKGERRRGKGHDGLYQGLSTATKDTYDALHMQALPPRRAKRSGSGVKQTLNFDLLKLAGDVESNPGPSRGHMTEYKPTVRLATRDDVPRAVRTLAAAFADYPATRHTVDPDRHIERVTELQELFLTRVGLDIGKVWVADDGAAVAVWTTPESVEAGAVFAEIGPRMAELSGSRLAAQQQMEGLLAPHRPKEPAWFLATVGVSPDHQGKGLGSAVVLPGVEAAERAGVPAFLETSAPRNLPFYERLGFTVTADVEVPEGPRTWCMTRKPGA

SEQ ID NO: 10340 - protein, 1021 aa, -Artificial-Sequence
MALPVTALLLPLALLLHAARPDIQMTQSPSSLSASVGDRVTITCKASDHINNWLAWYQQKPGQAPKLLIYGATTLETGVPSRFSGSGSGTDYTLTISSLQPEDFATYYCQQSWNTPWTFGQGTKLEIKRLEADVSPKPTIFLPSIAETKLQKAGTYLCLLEKFFPDVIKIHWQEKKSNTILGSQEGNTMKTNDTYMKFSWLTVPEKSLDKEHRCIVRHENNKNGVDQEIIFPPIKTDVITGSQSFGLLDPKLCYLLDGILFIYGVILTALFLRVKFSRSADAPAYQQGQNQLYNELNLGRREEYDVLDKRRGRDPEMGGKPQRRKNPQEGLYNELQKDKMAEAYSEIGMKGERRRGKGHDGLYQGLSTATKDTYDALHMQALPPRRAKRSGSGATNFSLLKQAGDVEENPGPTSMDWIWRILFLVGAATGAHSFEQVQLQQPGAELVKPGASVKMSCKASGYAFSSYWINWMKQKPGQGLEWIGQIYPGDGDTNYNGKFKGRATLTADTSSSTAYMQLSSLTSEDSAVYFCARSITTVVGCAMDYWGQGTSVTVSSTRSQPHTKPSVFVMKNGTNVACLVKEFYPKDIRINLVSSKKITEFDPAIVISPSGKYNAVKLGKYEDSNSVTCSVQHDNKTVHSTDFGTQSFGLLDPKLCYLLDGILFIYGVILTALFLRVKFSRSADAPAYQQGQNQLYNELNLGRREEYDVLDKRRGRDPEMGGKPQRRKNPQEGLYNELQKDKMAEAYSEIGMKGERRRGKGHDGLYQGLSTATKDTYDALHMQALPPRRAKRSGSGVKQTLNFDLLKLAGDVESNPGPSRGHMTEYKPTVRLATRDDVPRAVRTLAAAFADYPATRHTVDPDRHIERVTELQELFLTRVGLDIGKVWVADDGAAVAVWTTPESVEAGAVFAEIGPRMAELSGSRLAAQQQMEGLLAPHRPKEPAWFLATVGVSPDHQGKGLGSAVVLPGVEAAERAGVPAFLETSAPRNLPFYERLGFTVTADVEVPEGPRTWCMTRKPGA

SEQ ID NO: 10341 - protein, 949 aa, -Artificial-Sequence
MSKQRGTFSEVSLAQDPKWQQRKPKGNKSSISGTEQEIFQVELNLQNASLNHQGIDKIYDCQGLLPPPEKLTAEVLGIICIVLMATVLKTIVLIPFLEQNNSSPNARTQKARHCGHCPEEWITYSNSCYYIGKERRTWEESLQACASKNSSSLLCIDNEEEMKFLASILPSSWIGVFRNSSHHPWVTINGLAFKHEIKDSDHAERNCAMLHVRGLISDQCGSSRIIRRGFIMLTRLVLNSGGGGSGGGGSGGGGSEFDIQMTQSPSSLSASVGDRVTITCKASDHINNWLAWYQQKPGQAPKLLIYGATTLETGVPSRFSGSGSGTDYTLTISSLQPEDFATYYCQQSWNTPWTFGQGTKLEIKRLERAKRSGSGATNFSLLKQAGDVEENPGPTSTMAVFKTTLWRLISGTLGIICLSLMSTLGILLKNSFTKLSIEPAFTPGPNIELQKDSDCCSCQEKWVGYRCNCYFISSEQKTWNESRHLCASQKSSLLQLQNTDELDFMSSSQQFYWIGLSYSEEHTAWLWENGSALSQYLFPSFETFNTKNCIAYNPNGNALDESCEDKNRYICKQQLIGGGGSGGGGSGGGGSFEQVQLQQPGAELVKPGASVKMSCKASGYAFSSYWINWMKQKPGQGLEWIGQIYPGDGDTNYNGKFKGRATLTADTSSSTAYMQLSSLTSEDSAVYFCARSITTVVGCAMDYWGQGTSVTVSSTRRAKRSGSGVKQTLNFDLLKLAGDVESNPGPSRGHMTEYKPTVRLATRDDVPRAVRTLAAAFADYPATRHTVDPDRHIERVTELQELFLTRVGLDIGKVWVADDGAAVAVWTTPESVEAGAVFAEIGPRMAELSGSRLAAQQQMEGLLAPHRPKEPAWFLATVGVSPDHQGKGLGSAVVLPGVEAAERAGVPAFLETSAPRNLPFYERLGFTVTADVEVPEGPRTWCMTRKPGA

SEQ ID NO: 10342 - protein, 930 aa, -Artificial-Sequence
MALPVTALLLPLALLLHAARPDIQMTQSPSSLSASVGDRVTITCKASDHINNWLAWYQQKPGQAPKLLIYGATTLETGVPSRFSGSGSGTDYTLTISSLQPEDFATYYCQQSWNTPWTFGQGTKLEIKRGGGGSGGGGSGGGGSQVQLQQPGAELVKPGASVKMSCKASGYAFSSYWINWMKQKPGQGLEWIGQIYPGDGDTNYNGKFKGRATLTADTSSSTAYMQLSSLTSEDSAVYFCARSITTVVGCAMDYWGQGTSVTVSSTRGGGGSGGGGSGGGGSARGMRTEDLPKAVVFLEPQWYRVLEKDSVTLKCQGAYSPEDNSTQWFHNESLISSQASSYFIDAATVDDSGEYRCQTNLSTLSDPVQLEVHIGWLLLQAPRWVFKEEDPIHLRCHSWKNTALHKVTYLQNGKGRKYFHHNSDFYIPKATLKDSGSYFCRGLVGSKNVSSETVNITITQGLAVPTISSFFPPGYQVSFCLVMVLLFAVDTGLYFSVKTNIRSSTRDWKDHKFKWRKDPQDKRAKRSGSGVKQTLNFDLLKLAGDVESNPGPSRMASYPCHQHASAFDQAARSRGHSNRRTALRPRRQQEATEVRLEQKMPTLLRVYIDGPHGMGKTTTTQLLVALGSRDDIVYVPEPMTYWQVLGASETIANIYTTQHRLDQGEISAGDAAVVMTSAQITMGMPYAVTDAVLAPHVGGEAGSSHAPPPALTLIFDRHPIAALLCYPAARYLMGSMTPQAVLAFVALIPPTLPGTNIVLGALHEDRHIDRLAKRQRPGERLDLAMLAAIRRVYGLLANTVRYLQGGGSWWEDWGQLSGTAVPPQGAEPQSNAGPRPHIGDTLFTLFRAPELLAPNGDLYNVFAWALDVLAKRLRPMHVFILDYDQSPAGCRDALLQLTSGMVQTHVTTPGSIPTICDLARTFAREMGEAN

SEQ ID NO: 10343 - protein, 864 aa, -Artificial-Sequence
MALPVTALLLPLALLLHAARPDIQMTQSPSSLSASVGDRVTITCKASDHINNWLAWYQQKPGQAPKLLIYGATTLETGVPSRFSGSGSGTDYTLTISSLQPEDFATYYCQQSWNTPWTFGQGTKLEIKRGGGGSGGGGSGGGGSQVQLQQPGAELVKPGASVKMSCKASGYAFSSYWINWMKQKPGQGLEWIGQIYPGDGDTNYNGKFKGRATLTADTSSSTAYMQLSSLTSEDSAVYFCARSITTVVGCAMDYWGQGTSVTVSSTRGGGGSGGGGSGGGGSARGMRTEDLPKAVVFLEPQWYRVLEKDSVTLKCQGAYSPEDNSTQWFHNESLISSQASSYFIDAATVDDSGEYRCQTNLSTLSDPVQLEVHIGWLLLQAPRWVFKEEDPIHLRCHSWKNTALHKVTYLQNGKGRKYFHHNSDFYIPKATLKDSGSYFCRGLVGSKNVSSETVNITITQGLAVPTISSFFPPGYQVSFCLVMVLLFAVDTGLYFSVKTNIRSSTRDWKDHKFKWRKDPQDKRAKRSGSGVKQTLNFDLLKLAGDVESNPGPSRMALPRRPPTLTRVYLDGPFGIGKTSILNAMPDHTPDGAPILKVYEPMKYWRCQSTDLVVAANETPERRRGGALSRFQSDMIMASIQARFADPYLLFHERLSSKCRGKIEICDTPAIILMLDRHPVAAILCFPITRYLLGEYSLEMLISSIIRLPLESPGCNLTVTILPDEKEHVNRICSRDRPGETADRNMLRTLNAVYASLVDTVKYANLTCPYEKESWEMEWLGLPWFEESLLEEFISRPRPVICSRTRMPLDRTLLAIFKRKELCSENGELLTQYSWILWGLLTKLHTINVELFDISGMSRRECATL

SEQ ID NO: 10344 - protein, 620 aa, -Artificial-Sequence; identical to SEQ ID NO: 8372

SEQ ID NO: 10345 - protein, 950 aa, -Artificial-Sequence
MALPVTALLLPLALLLHAARPDIQMTQSPSSLSASVGDRVTITCKASDHINNWLAWYQQKPGQAPKLLIYGATTLETGVPSRFSGSGSGTDYTLTISSLQPEDFATYYCQQSWNTPWTFGQGTKLEIKRGGGGSGGGGSGGGGSQVQLQQPGAELVKPGASVKMSCKASGYAFSSYWINWMKQKPGQGLEWIGQIYPGDGDTNYNGKFKGRATLTADTSSSTAYMQLSSLTSEDSAVYFCARSITTVVGCAMDYWGQGTSVTVSSTRKIEVMYPPPYLDNEKSNGTIIHVKGGSVVEKEHPQLGAGTVLLLRAGFYAVSFLSVAVGSTVYYQGKCLTWKGPRRQLPAVVPAPLPPPCGSSAHLLPPVPGGRAKRSGSGATNFSLLKQAGDVEENPGPTSMDWIWRILFLVGAATGAHSFEEVQLVQSGAEVKKPGESLKISCKGSGYSFTSYWIGWVRQMPGKGLEWMGIIYPGDSDTRYSPSFQGQVTISADKSISTAYLQWSSLKASDTAMYYCARQVWGWQGGMYPRSNWWYNLDSWGQGTLVTVSSASTKGPSVFPLAPSSKSTSGGTAALGCLVKDYFPEPVTVSWNSGALTSGVHTFPAVLQSSGLYSLSSVVTVPSSSLGTQTYICNVNHKPSNTKVDKRVEPKSCGTITQGLAVSTISSFFPPGYQVSFCLVMVLLFAVDTGLYFSVKTNIRSSTRDWKDHKFKWRKDPQDKRAKRSGSGATNFSLLKQAGDVEENPGPSRGHMTEYKPTVRLATRDDVPRAVRTLAAAFADYPATRHTVDPDRHIERVTELQELFLTRVGLDIGKVWVADDGAAVAVWTTPESVEAGAVFAEIGPRMAELSGSRLAAQQQMEGLLAPHRPKEPAWFLATVGVSPDHQGKGLGSAVVLPGVEAAERAGVPAFLETSAPRNLPFYERLGFTVTADVEVPEGPRTWCMTRKPGA

SEQ ID NO: 10346 - protein, 640 aa, -Artificial-Sequence; identical to SEQ ID NO: 8387

SEQ ID NO: 10347 - protein, 1051 aa, -Artificial-Sequence; identical to SEQ ID NO: 4681

SEQ ID NO: 10348 - protein, 609 aa, -Artificial-Sequence; identical to SEQ ID NO: 8385

SEQ ID NO: 10349 - protein, 735 aa, -Artificial-Sequence; identical to SEQ ID NO: 8386

SEQ ID NO: 10350 - protein, 1051 aa, -Artificial-Sequence; identical to SEQ ID NO: 4681

SEQ ID NO: 10351 - protein, 1036 aa, -Artificial-Sequence; identical to SEQ ID NO: 4683

SEQ ID NO: 10352 - protein, 1048 aa, -Artificial-Sequence
MALPVTALLLPLALLLHAARPDIQMTQTTSSLSASLGDRVTISCRASQDISKYLNWYQQKPDGTVKLLIYHTSRLHSGVPSRFSGSGSGTDYSLTISNLEQEDIATYFCQQGNTLPYTFGGGTKLEITLEDLKNVFPPEVAVFEPSKAEIAHTQKATLVCLATGFYPDHVELSWWVNGKEVHSGVCTDPQPLKEQPALNDSRYCLSSRLRVSATFWQNPRNHFRCQVQFYGLSENDEWTQDRAKPVTQIVSAEAWGRADCGSQSFGLLDPKLCYLLDGILFIYGVILTALFLRVKFSRSADAPAYQQGQNQLYNELNLGRREEYDVLDKRRGRDPEMGGKPQRRKNPQEGLYNELQKDKMAEAYSEIGMKGERRRGKGHDGLYQGLSTATKDTYDALHMQALPPRRAKRSGSGATNFSLLKQAGDVEENPGPTSMDWIWRILFLVGAATGAHSFEVKLQESGPGLVAPSQSLSVTCTVSGVSLPDYGVSWIRQPPRKGLEWLGVIWGSETTYYNSALKSRLTIIKDNSKSQVFLKMNSLQTDDTAIYYCAKHYYYGGSYAMDYWGQGTSVTVSSTRIQNPDPAVYQLRDSKSSDKSVCLFTDFDSQTNVSQSKDSDVYITDKCVLDMRSMDFKSNSAVAWSNKSDFACANAFNNSIIPEDTFFPSPESSCGTQSFGLLDPKLCYLLDGILFIYGVILTALFLRVKFSRSADAPAYQQGQNQLYNELNLGRREEYDVLDKRRGRDPEMGGKPQRRKNPQEGLYNELQKDKMAEAYSEIGMKGERRRGKGHDGLYQGLSTATKDTYDALHMQALPPRRAKRSGSGVKQTLNFDLLKLAGDVESNPGPSRGHMTEYKPTVRLATRDDVPRAVRTLAAAFADYPATRHTVDPDRHIERVTELQELFLTRVGLDIGKVWVADDGAAVAVWTTPESVEAGAVFAEIGPRMAELSGSRLAAQQQMEGLLAPHRPKEPAWFLATVGVSPDHQGKGLGSAVVLPGVEAAERAGVPAFLETSAPRNLPFYERLGFTVTADVEVPEGPRTWCMTRKPGA

SEQ ID NO: 10353 - protein, 1036 aa, -Artificial-Sequence; identical to SEQ ID NO: 4683

SEQ ID NO: 10354 - protein, 738 aa, -Artificial-Sequence; identical to SEQ ID NO: 8368

SEQ ID NO: 10355 - protein, 983 aa, -Artificial-Sequence
MALPVTALLLPLALLLHAARPDIQMTQSPSSLSASVGDRVTITCKASDHINNWLAWYQQKPGQAPKLLIYGATTLETGVPSRFSGSGSGTDYTLTISSLQPEDFATYYCQQSWNTPWTFGQGTKLEIKRLEGQPKANPTVTLFPPSSEELQANKATLVCLISDFYPGAVTVAWKADGSPVKAGVETTKPSKQSNNKYAASSYLSLTPEQWKSHRSYSCQVTHEGSTVEKTVAPTECSGSQSFGLLDPKLCYLLDGILFIYGVILTALFLRVKFSRSADAPAYQQGQNQLYNELNLGRREEYDVLDKRRGRDPEMGGKPQRRKNPQEGLYNELQKDKMAEAYSEIGMKGERRRGKGHDGLYQGLSTATKDTYDALHMQALPPRRAKRSGSGATNFSLLKQAGDVEENPGPTSMDWIWRILFLVGAATGAHSFEQVQLQQPGAELVKPGASVKMSCKASGYAFSSYWINWMKQKPGQGLEWIGQIYPGDGDTNYNGKFKGRATLTADTSSSTAYMQLSSLTSEDSAVYFCARSITTVVGCAMDYWGQGTSVTVSSTRASTKGPSVFPLAPSSKSTSGGTAALGCLVKDYFPEPVTVSWNSGALTSGVHTFPAVLQSSGLYSLSSVVTVPSSSLGTQTYICNVNHKPSNTKVDKRVEPKSCGTGDIENTSLAPEDPTFPADTWGTYLLTTETGLQKDHALWDHTAQNLLRMGLAFLVLVALVWFLVEDWLSRKRTRERASRASTWEGRRRLNTQTLRAKRSGSGATNFSLLKQAGDVEENPGPSRGHMTEYKPTVRLATRDDVPRAVRTLAAAFADYPATRHTVDPDRHIERVTELQELFLTRVGLDIGKVWVADDGAAVAVWTTPESVEAGAVFAEIGPRMAELSGSRLAAQQQMEGLLAPHRPKEPAWFLATVGVSPDHQGKGLGSAVVLPGVEAAERAGVPAFLETSAPRNLPFYERLGFTVTADVEVPEGPRTWCMTRKPGA

SEQ ID NO: 10356 - protein, 1049 aa, -Artificial-Sequence
MALPVTALLLPLALLLHAARPDIQMTQSPSSLSASVGDRVTITCKASDHINNWLAWYQQKPGQAPKLLIYGATTLETGVPSRFSGSGSGTDYTLTISSLQPEDFATYYCQQSWNTPWTFGQGTKLEIKRLEGQPKANPTVTLFPPSSEELQANKATLVCLISDFYPGAVTVAWKADGSPVKAGVETTKPSKQSNNKYAASSYLSLTPEQWKSHRSYSCQVTHEGSTVEKTVAPTECSGSQSFGLLDPKLCYLLDGILFIYGVILTALFLRVKFSRSADAPAYQQGQNQLYNELNLGRREEYDVLDKRRGRDPEMGGKPQRRKNPQEGLYNELQKDKMAEAYSEIGMKGERRRGKGHDGLYQGLSTATKDTYDALHMQALPPRRAKRSGSGATNFSLLKQAGDVEENPGPTSMDWIWRILFLVGAATGAHSFEQVQLQQPGAELVKPGASVKMSCKASGYAFSSYWINWMKQKPGQGLEWIGQIYPGDGDTNYNGKFKGRATLTADTSSSTAYMQLSSLTSEDSAVYFCARSITTVVGCAMDYWGQGTSVTVSSTRASTKGPSVFPLAPSSKSTSGGTAALGCLVKDYFPEPVTVSWNSGALTSGVHTFPAVLQSSGLYSLSSVVTVPSSSLGTQTYICNVNHKPSNTKVDKRVEPKSCGTKSVRFYLVVSPASASTQTSWTPRDLVSSQTQTQSCVPPTAGARQAPESPSTIPVPSQPQNSTLRPGPAAPIALVPVFCGLLVAKSLVLSALLVWWGDIWWKTMMELRSLDTQKATCHLQQVTDLPWTSVSSPVEREILYHTVARTKISDDDDEHTLRAKRSGSGVKQTLNFDLLKLAGDVESNPGPSRGHMTEYKPTVRLATRDDVPRAVRTLAAAFADYPATRHTVDPDRHIERVTELQELFLTRVGLDIGKVWVADDGAAVAVWTTPESVEAGAVFAEIGPRMAELSGSRLAAQQQMEGLLAPHRPKEPAWFLATVGVSPDHQGKGLGSAVVLPGVEAAERAGVPAFLETSAPRNLPFYERLGFTVTADVEVPEGPRTWCMTRKPGA

SEQ ID NO: 10357 - protein, 969 aa, -Artificial-Sequence
MALPVTALLLPLALLLHAARPDIQMTQSPSSLSASVGDRVTITCKASDHINNWLAWYQQKPGQAPKLLIYGATTLETGVPSRFSGSGSGTDYTLTISSLQPEDFATYYCQQSWNTPWTFGQGTKLEIKRLEGQPKANPTVTLFPPSSEELQANKATLVCLISDFYPGAVTVAWKADGSPVKAGVETTKPSKQSNNKYAASSYLSLTPEQWKSHRSYSCQVTHEGSTVEKTVAPTECSGSQSFGLLDPKLCYLLDGILFIYGVILTALFLRVKFSRSADAPAYQQGQNQLYNELNLGRREEYDVLDKRRGRDPEMGGKPQRRKNPQEGLYNELQKDKMAEAYSEIGMKGERRRGKGHDGLYQGLSTATKDTYDALHMQALPPRRAKRSGSGATNFSLLKQAGDVEENPGPTSMDWIWRILFLVGAATGAHSFEQVQLQQPGAELVKPGASVKMSCKASGYAFSSYWINWMKQKPGQGLEWIGQIYPGDGDTNYNGKFKGRATLTADTSSSTAYMQLSSLTSEDSAVYFCARSITTVVGCAMDYWGQGTSVTVSSTRASTKGPSVFPLAPSSKSTSGGTAALGCLVKDYFPEPVTVSWNSGALTSGVHTFPAVLQSSGLYSLSSVVTVPSSSLGTQTYICNVNHKPSNTKVDKRVEPKSCGTVVEKEHPQLGAGTVLLLRAGFYAVSFLSVAVGSTVYYQGKCLTWKGPRRQLPAVVPAPLPPPCGSSAHLLPPVPGGRAKRSGSGVKQTLNFDLLKLAGDVESNPGPSRGHMTEYKPTVRLATRDDVPRAVRTLAAAFADYPATRHTVDPDRHIERVTELQELFLTRVGLDIGKVWVADDGAAVAVWTTPESVEAGAVFAEIGPRMAELSGSRLAAQQQMEGLLAPHRPKEPAWFLATVGVSPDHQGKGLGSAVVLPGVEAAERAGVPAFLETSAPRNLPFYERLGFTVTADVEVPEGPRTWCMTRKPGA

SEQ ID NO: 10358 - protein, 998 aa, -Artificial-Sequence
MALPVTALLLPLALLLHAARPDIQMTQSPSSLSASVGDRVTITCKASDHINNWLAWYQQKPGQAPKLLIYGATTLETGVPSRFSGSGSGTDYTLTISSLQPEDFATYYCQQSWNTPWTFGQGTKLEIKRLEDLKNVFPPEVAVFEPSEAEISHTQKATLVCLATGFYPDHVELSWWVNGKEVHSGVSTDPQPLKEQPALNDSRYCLSSRLRVSATFWQNPRNHFRCQVQFYGLSENDEWTQDRAKPVTQIVSAEAWGRADCGSQSFGLLDPKLCYLLDGILFIYGVILTALFLRVKFSRSADAPAYQQGQNQLYNELNLGRREEYDVLDKRRGRDPEMGGKPQRRKNPQEGLYNELQKDKMAEAYSEIGMKGERRRGKGHDGLYQGLSTATKDTYDALHMQALPPRRAKRSGSGATNFSLLKQAGDVEENPGPTSMDWIWRILFLVGAATGAHSFEQVQLQQPGAELVKPGASVKMSCKASGYAFSSYWINWMKQKPGQGLEWIGQIYPGDGDTNYNGKFKGRATLTADTSSSTAYMQLSSLTSEDSAVYFCARSITTVVGCAMDYWGQGTSVTVSSTRIQNPDPAVYQLRDSKSSDKSVCLFTDFDSQTNVSQSKDSDVYITDKTVLDMRSMDFKSNSAVAWSNKSDFACANAFNNSIIPEDTFFPSPESSCGTGDIENTSLAPEDPTFPADTWGTYLLTTETGLQKDHALWDHTAQNLLRMGLAFLVLVALVWFLVEDWLSRKRTRERASRASTWEGRRRLNTQTLRAKRSGSGATNFSLLKQAGDVEENPGPSRGHMTEYKPTVRLATRDDVPRAVRTLAAAFADYPATRHTVDPDRHIERVTELQELFLTRVGLDIGKVWVADDGAAVAVWTTPESVEAGAVFAEIGPRMAELSGSRLAAQQQMEGLLAPHRPKEPAWFLATVGVSPDHQGKGLGSAVVLPGVEAAERAGVPAFLETSAPRNLPFYERLGFTVTADVEVPEGPRTWCMTRKPGA

SEQ ID NO: 10359 - protein, 1064 aa, -Artificial-Sequence
MALPVTALLLPLALLLHAARPDIQMTQSPSSLSASVGDRVTITCKASDHINNWLAWYQQKPGQAPKLLIYGATTLETGVPSRFSGSGSGTDYTLTISSLQPEDFATYYCQQSWNTPWTFGQGTKLEIKRLEDLKNVFPPEVAVFEPSEAEISHTQKATLVCLATGFYPDHVELSWWVNGKEVHSGVSTDPQPLKEQPALNDSRYCLSSRLRVSATFWQNPRNHFRCQVQFYGLSENDEWTQDRAKPVTQIVSAEAWGRADCGSQSFGLLDPKLCYLLDGILFIYGVILTALFLRVKFSRSADAPAYQQGQNQLYNELNLGRREEYDVLDKRRGRDPEMGGKPQRRKNPQEGLYNELQKDKMAEAYSEIGMKGERRRGKGHDGLYQGLSTATKDTYDALHMQALPPRRAKRSGSGATNFSLLKQAGDVEENPGPTSMDWIWRILFLVGAATGAHSFEQVQLQQPGAELVKPGASVKMSCKASGYAFSSYWINWMKQKPGQGLEWIGQIYPGDGDTNYNGKFKGRATLTADTSSSTAYMQLSSLTSEDSAVYFCARSITTVVGCAMDYWGQGTSVTVSSTRIQNPDPAVYQLRDSKSSDKSVCLFTDFDSQTNVSQSKDSDVYITDKTVLDMRSMDFKSNSAVAWSNKSDFACANAFNNSIIPEDTFFPSPESSCGTKSVRFYLVVSPASASTQTSWTPRDLVSSQTQTQSCVPPTAGARQAPESPSTIPVPSQPQNSTLRPGPAAPIALVPVFCGLLVAKSLVLSALLVWWGDIWWKTMMELRSLDTQKATCHLQQVTDLPWTSVSSPVEREILYHTVARTKISDDDDEHTLRAKRSGSGVKQTLNFDLLKLAGDVESNPGPSRGHMTEYKPTVRLATRDDVPRAVRTLAAAFADYPATRHTVDPDRHIERVTELQELFLTRVGLDIGKVWVADDGAAVAVWTTPESVEAGAVFAEIGPRMAELSGSRLAAQQQMEGLLAPHRPKEPAWFLATVGVSPDHQGKGLGSAVVLPGVEAAERAGVPAFLETSAPRNLPFYERLGFTVTADVEVPEGPRTWCMTRKPGA

SEQ ID NO: 10360 - protein, 984 aa, -Artificial-Sequence
MALPVTALLLPLALLLHAARPDIQMTQSPSSLSASVGDRVTITCKASDHINNWLAWYQQKPGQAPKLLIYGATTLETGVPSRFSGSGSGTDYTLTISSLQPEDFATYYCQQSWNTPWTFGQGTKLEIKRLEDLKNVFPPEVAVFEPSEAEISHTQKATLVCLATGFYPDHVELSWWVNGKEVHSGVSTDPQPLKEQPALNDSRYCLSSRLRVSATFWQNPRNHFRCQVQFYGLSENDEWTQDRAKPVTQIVSAEAWGRADCGSQSFGLLDPKLCYLLDGILFIYGVILTALFLRVKFSRSADAPAYQQGQNQLYNELNLGRREEYDVLDKRRGRDPEMGGKPQRRKNPQEGLYNELQKDKMAEAYSEIGMKGERRRGKGHDGLYQGLSTATKDTYDALHMQALPPRRAKRSGSGATNFSLLKQAGDVEENPGPTSMDWIWRILFLVGAATGAHSFEQVQLQQPGAELVKPGASVKMSCKASGYAFSSYWINWMKQKPGQGLEWIGQIYPGDGDTNYNGKFKGRATLTADTSSSTAYMQLSSLTSEDSAVYFCARSITTVVGCAMDYWGQGTSVTVSSTRIQNPDPAVYQLRDSKSSDKSVCLFTDFDSQTNVSQSKDSDVYITDKTVLDMRSMDFKSNSAVAWSNKSDFACANAFNNSIIPEDTFFPSPESSCGTVVEKEHPQLGAGTVLLLRAGFYAVSFLSVAVGSTVYYQGKCLTWKGPRRQLPAVVPAPLPPPCGSSAHLLPPVPGGRAKRSGSGVKQTLNFDLLKLAGDVESNPGPSRGHMTEYKPTVRLATRDDVPRAVRTLAAAFADYPATRHTVDPDRHIERVTELQELFLTRVGLDIGKVWVADDGAAVAVWTTPESVEAGAVFAEIGPRMAELSGSRLAAQQQMEGLLAPHRPKEPAWFLATVGVSPDHQGKGLGSAVVLPGVEAAERAGVPAFLETSAPRNLPFYERLGFTVTADVEVPEGPRTWCMTRKPGA

SEQ ID NO: 10361 - protein, 955 aa, -Artificial-Sequence
MALPVTALLLPLALLLHAARPDIQMTQSPSSLSASVGDRVTITCKASDHINNWLAWYQQKPGQAPKLLIYGATTLETGVPSRFSGSGSGTDYTLTISSLQPEDFATYYCQQSWNTPWTFGQGTKLEIKRLEGQPKANPTVTLFPPSSEELQANKATLVCLISDFYPGAVTVAWKADGSPVKAGVETTKPSKQSNNKYAASSYLSLTPEQWKSHRSYSCQVTHEGSTVEKTVAPTECSGSQSFGLLDPKLCYLLDGILFIYGVILTALFLRVKFSRSADAPAYQQGQNQLYNELNLGRREEYDVLDKRRGRDPEMGGKPQRRKNPQEGLYNELQKDKMAEAYSEIGMKGERRRGKGHDGLYQGLSTATKDTYDALHMQALPPRRAKRSGSGATNFSLLKQAGDVEENPGPTSMDWIWRILFLVGAATGAHSFEQVQLQQPGAELVKPGASVKMSCKASGYAFSSYWINWMKQKPGQGLEWIGQIYPGDGDTNYNGKFKGRATLTADTSSSTAYMQLSSLTSEDSAVYFCARSITTVVGCAMDYWGQGTSVTVSSTRASTKGPSVFPLAPSSKSTSGGTAALGCLVKDYFPEPVTVSWNSGALTSGVHTFPAVLQSSGLYSLSSVVTVPSSSLGTQTYICNVNHKPSNTKVDKRVEPKSCGTITQGLAVSTISSFFPPGYQVSFCLVMVLLFAVDTGLYFSVKTNIRSSTRDWKDHKFKWRKDPQDKRAKRSGSGATNFSLLKQAGDVEENPGPSRGHMTEYKPTVRLATRDDVPRAVRTLAAAFADYPATRHTVDPDRHIERVTELQELFLTRVGLDIGKVWVADDGAAVAVWTTPESVEAGAVFAEIGPRMAELSGSRLAAQQQMEGLLAPHRPKEPAWFLATVGVSPDHQGKGLGSAVVLPGVEAAERAGVPAFLETSAPRNLPFYERLGFTVTADVEVPEGPRTWCMTRKPGA

SEQ ID NO: 10362 - protein, 970 aa, -Artificial-Sequence
MALPVTALLLPLALLLHAARPDIQMTQSPSSLSASVGDRVTITCKASDHINNWLAWYQQKPGQAPKLLIYGATTLETGVPSRFSGSGSGTDYTLTISSLQPEDFATYYCQQSWNTPWTFGQGTKLEIKRLEDLKNVFPPEVAVFEPSEAEISHTQKATLVCLATGFYPDHVELSWWVNGKEVHSGVSTDPQPLKEQPALNDSRYCLSSRLRVSATFWQNPRNHFRCQVQFYGLSENDEWTQDRAKPVTQIVSAEAWGRADCGSQSFGLLDPKLCYLLDGILFIYGVILTALFLRVKFSRSADAPAYQQGQNQLYNELNLGRREEYDVLDKRRGRDPEMGGKPQRRKNPQEGLYNELQKDKMAEAYSEIGMKGERRRGKGHDGLYQGLSTATKDTYDALHMQALPPRRAKRSGSGATNFSLLKQAGDVEENPGPTSMDWIWRILFLVGAATGAHSFEQVQLQQPGAELVKPGASVKMSCKASGYAFSSYWINWMKQKPGQGLEWIGQIYPGDGDTNYNGKFKGRATLTADTSSSTAYMQLSSLTSEDSAVYFCARSITTVVGCAMDYWGQGTSVTVSSTRIQNPDPAVYQLRDSKSSDKSVCLFTDFDSQTNVSQSKDSDVYITDKTVLDMRSMDFKSNSAVAWSNKSDFACANAFNNSIIPEDTFFPSPESSCGTITQGLAVSTISSFFPPGYQVSFCLVMVLLFAVDTGLYFSVKTNIRSSTRDWKDHKFKWRKDPQDKRAKRSGSGATNFSLLKQAGDVEENPGPSRGHMTEYKPTVRLATRDDVPRAVRTLAAAFADYPATRHTVDPDRHIERVTELQELFLTRVGLDIGKVWVADDGAAVAVWTTPESVEAGAVFAEIGPRMAELSGSRLAAQQQMEGLLAPHRPKEPAWFLATVGVSPDHQGKGLGSAVVLPGVEAAERAGVPAFLETSAPRNLPFYERLGFTVTADVEVPEGPRTWCMTRKPGA

SEQ ID NO: 10363 - protein, 359 aa, -Artificial-Sequence; identical to SEQ ID NO: 9896

SEQ ID NO: 10364 - protein, 989 aa, -Artificial-Sequence
MALPVTALLLPLALLLHAARPDIQMTQSPSSLSASVGDRVTITCKASDHINNWLAWYQQKPGQAPKLLIYGATTLETGVPSRFSGSGSGTDYTLTISSLQPEDFATYYCQQSWNTPWTFGQGTKLEIKRLEDLKNVFPPEVAVFEPSEAEISHTQKATLVCLATGFYPDHVELSWWVNGKEVHSGVSTDPQPLKEQPALNDSRYCLSSRLRVSATFWQNPRNHFRCQVQFYGLSENDEWTQDRAKPVTQIVSAEAWGRADCGSQSFGLLDPKLCYLLDGILFIYGVILTALFLRVKFSRSADAPAYQQGQNQLYNELNLGRREEYDVLDKRRGRDPEMGGKPQRRKNPQEGLYNELQKDKMAEAYSEIGMKGERRRGKGHDGLYQGLSTATKDTYDALHMQALPPRRAKRSGSGATNFSLLKQAGDVEENPGPTSMDWIWRILFLVGAATGAHSFEQVQLQQPGAELVKPGASVKMSCKASGYAFSSYWINWMKQKPGQGLEWIGQIYPGDGDTNYNGKFKGRATLTADTSSSTAYMQLSSLTSEDSAVYFCARSITTVVGCAMDYWGQGTSVTVSSTRASTKGPSVFPLAPSSKSTSGGTAALGCLVKDYFPEPVTVSWNSGALTSGVHTFPAVLQSSGLYSLSSVVTVPSSSLGTQTYICNVNHKPSNTKVDKRVEPKSCTTPGERSSLPAFYPGTSGSCSGCGSLSLPLLAGLVAADAVASLLIVGAVFLCARPRRSPAQEDGKVYINMPGRGRAKRSGSGVKQTLNFDLLKLAGDVESNPGPSRGHMTEYKPTVRLATRDDVPRAVRTLAAAFADYPATRHTVDPDRHIERVTELQELFLTRVGLDIGKVWVADDGAAVAVWTTPESVEAGAVFAEIGPRMAELSGSRLAAQQQMEGLLAPHRPKEPAWFLATVGVSPDHQGKGLGSAVVLPGVEAAERAGVPAFLETSAPRNLPFYERLGFTVTADVEVPEGPRTWCMTRKPGA

SEQ ID NO: 10365 - protein, 481 aa, -Artificial-Sequence
MGWIRGRRSRHSWEMSEFHNYNLDLKKSDFSTRWQKQRCPVVKSKCRENASPFFFCCFIAVAMGIRFIIMVAIWSAVFLNSLFNQEVQIPLTESYCGPCPKNWICYKNNCYQFFDESKNWYESQASCMSQNASLLKVYSKEDQDLLKLVKSYHWMGLVHIPTNGSWQWEDGSILSPNLLTIIEMQKGDCALYASSFKGYIENCSTPNTYICMQRTVGGGGSGGGGSGGGGSEFDIVMTQSPATLSLSPGERATLSCRSSKSLQNVNGNTYLYWFQQKPGQSPQLLIYRMSNLNSGVPDRFSGSGSGTEFTLTISSLEPEDFAVYYCMQHLEYPITFGAGTKLEIKGGGGSGGGGSGGGGSEVQLVESGGGLVKPGGSLKLSCAASGYTFTSYVMHWVRQAPGKGLEWIGYINPYNDGTKYNEKFQGRVTISSDKSISTAYMELSSLRSEDTAMYYCARGTYYYGTRVFDYWGQGTLVTVSS

SEQ ID NO: 10366 - protein, 477 aa, -Artificial-Sequence
MGWIRGRRSRHSWEMSEFHNYNLDLKKSDFSTRWQKQRCPVVKSKCRENASPFFFCCFIAVAMGIRFIIMVAIWSAVFLNSLFNQEVQIPLTESYCGPCPKNWICYKNNCYQFFDESKNWYESQASCMSQNASLLKVYSKEDQDLLKLVKSYHWMGLVHIPTNGSWQWEDGSILSPNLLTIIEMQKGDCALYASSFKGYIENCSTPNTYICMQRTVGGGGSGGGGSGGGGSEFDIQMTQSPSSLSASVGDRVTITCKASDHINNWLAWYQQKPGQAPKLLIYGATTLETGVPSRFSGSGSGTDYTLTISSLQPEDFATYYCQQSWNTPWTFGQGTKLEIKRGGGGSGGGGSGGGGSQVQLQQPGAELVKPGASVKMSCKASGYAFSSYWINWMKQKPGQGLEWIGQIYPGDGDTNYNGKFKGRATLTADTSSSTAYMQLSSLTSEDSAVYFCARSITTVVGCAMDYWGQGTSVTVSS

SEQ ID NO: 10367 - protein, 773 aa, -Artificial-Sequence
MALPVTALLLPLALLLHAARPDIQMTQSPSSLSASVGDRVTITCKASDHINNWLAWYQQKPGQAPKLLIYGATTLETGVPSRFSGSGSGTDYTLTISSLQPEDFATYYCQQSWNTPWTFGQGTKLEIKRGGGGSGGGGSGGGGSQVQLQQPGAELVKPGASVKMSCKASGYAFSSYWINWMKQKPGQGLEWIGQIYPGDGDTNYNGKFKGRATLTADTSSSTAYMQLSSLTSEDSAVYFCARSITTVVGCAMDYWGQGTSVTVSSTRKIEVMYPPPYLDNEKSNGTIIHVKGARKSVRFYLVVSPASASTQTSWTPRDLVSSQTQTQSCVPPTAGARQAPESPSTIPVPSQPQNSTLRPGPAAPIALVPVFCGLLVAKSLVLSALLVWWGDIWWKTMMELRSLDTQKATCHLQQVTDLPWTSVSSPVEREILYHTVARTKISDDDDEHTLRAKRSGSGVKQTLNFDLLKLAGDVESNPGPSRMYRMQLLSCIALSLALVTNSAPTSSSTKKTQLQLEHLLLDLQMILNGINNYKNPKLTRMLTFKFYMPKKATELKHLQCLEEELKPLEEVLNLAQSKNFHLRPRDLISNINVIVLELKGSETTFMCEYADETATIVEFLNRWITFCQSIISTLTHMCPYSNPSLCSGGGGSELPTQGTFSNVSTNVSPAKPTTTACPYSNPSLCSGGGGSPAPRPPTPAPTIASQPLSLRPEACRPAAGGAVHTRGLDFACDIYIWAPLAGTCGVLLLSLVITLYCNHRNRRRVCKCPRPVV

SEQ ID NO: 10368 - protein, 663 aa, -Artificial-Sequence
MDWIWRILFLVGAATGAHSGPEVQLVESGGGLVQAGGSLRLSCAASGRTFSMGWFRQAPGKEREFVAAITYSGGSPYYADSVKGRFTISRDNAKNTVYLQMNSLKPEDTAVYYCAANPTYGSDWNAENWGQGTQVTVSSGSGGGGSGGGGSGGGGSFEGSTRTPAAPPKAVLKLEPQWINVLQEDSVTLTCRGTHSPESDSIQWFHNGNLIPTHTQPSYRFKANNNDSGEYTCQTGQTSLSDPVHLTVLSEWLVLQTPHLEFQEGETIVLRCHSWKDKPLVKVTFFQNGKSKKFSRSDPNFSIPQANHSHSGDYHCTGNIGYTLYSSKPVTITVQAPSSSPMGIIVAVVTGIAVAAIVAAVVALIYCRKKRISALPGYPECREMGETLPEKPANPTNPDEADKVGAENTITYSLLMHPDALEEPDDQNRIRAKRSGSGVKQTLNFDLLKLAGDVESNPGPSRGHMTEYKPTVRLATRDDVPRAVRTLAAAFADYPATRHTVDPDRHIERVTELQELFLTRVGLDIGKVWVADDGAAVAVWTTPESVEAGAVFAEIGPRMAELSGSRLAAQQQMEGLLAPHRPKEPAWFLATVGVSPDHQGKGLGSAVVLPGVEAAERAGVPAFLETSAPRNLPFYERLGFTVTADVEVPEGPRTWCMTRKPGA

SEQ ID NO: 10369 - protein, 1156 aa, -Artificial-Sequence
MALPVTALLLPLALLLHAARPDIQMTQSPSSLSASVGDRVTITCKASDHINNWLAWYQQKPGQAPKLLIYGATTLETGVPSRFSGSGSGTDYTLTISSLQPEDFATYYCQQSWNTPWTFGQGTKLEIKRLEGQPKANPTVTLFPPSSEELQANKATLVCLISDFYPGAVTVAWKADGSPVKAGVETTKPSKQSNNKYAASSYLSLTPEQWKSHRSYSCQVTHEGSTVEKTVAPTECSGSQSFGLLDPKLCYLLDGILFIYGVILTALFLRVKFSRSADAPAYQQGQNQLYNELNLGRREEYDVLDKRRGRDPEMGGKPQRRKNPQEGLYNELQKDKMAEAYSEIGMKGERRRGKGHDGLYQGLSTATKDTYDALHMQALPPRRAKRSGSGATNFSLLKQAGDVEENPGPTSMDWIWRILFLVGAATGAHSFEQVQLQQPGAELVKPGASVKMSCKASGYAFSSYWINWMKQKPGQGLEWIGQIYPGDGDTNYNGKFKGRATLTADTSSSTAYMQLSSLTSEDSAVYFCARSITTVVGCAMDYWGQGTSVTVSSTRASTKGPSVFPLAPSSKSTSGGTAALGCLVKDYFPEPVTVSWNSGALTSGVHTFPAVLQSSGLYSLSSVVTVPSSSLGTQTYICNVNHKPSNTKVDKRVEPKSCGTQSFGLLDPKLSYLLDGILFIYGVILTALFLWRRKRKEKQSETSPKEFLTIYEDVKDLKTRRNHEQEQTFPGGGSTIYSMIQSQSSAPTSQEPAYTLYSLIQPSRKSGSRKRNHSPSFNSTIYEVIGKSQPKAQNPARLSRKELENFDVYSSRRVKFSRSADAPAYQQGQNQLYNELNLGRREEYDVLDKRRGRDPEMGGKPQRRKNPQEGLYNELQKDKMAEAYSEIGMKGERRRGKGHDGLYQGLSTATKDTYDALHMQALPPRRAKRSGSGVKQTLNFDLLKLAGDVESNPGPGHMTEYKPTVRLATRDDVPRAVRTLAAAFADYPATRHTVDPDRHIERVTELQELFLTRVGLDIGKVWVADDGAAVAVWTTPESVEAGAVFAEIGPRMAELSGSRLAAQQQMEGLLAPHRPKEPAWFLATVGVSPDHQGKGLGSAVVLPGVEAAERAGVPAFLETSAPRNLPFYERLGFTVTADVEVPEGPRTWCMTRKPGA

SEQ ID NO: 10370 - protein, 1171 aa, -Artificial-Sequence
MALPVTALLLPLALLLHAARPDIQMTQSPSSLSASVGDRVTITCKASDHINNWLAWYQQKPGQAPKLLIYGATTLETGVPSRFSGSGSGTDYTLTISSLQPEDFATYYCQQSWNTPWTFGQGTKLEIKRLEDLKNVFPPEVAVFEPSEAEISHTQKATLVCLATGFYPDHVELSWWVNGKEVHSGVSTDPQPLKEQPALNDSRYCLSSRLRVSATFWQNPRNHFRCQVQFYGLSENDEWTQDRAKPVTQIVSAEAWGRADCGSQSFGLLDPKLCYLLDGILFIYGVILTALFLRVKFSRSADAPAYQQGQNQLYNELNLGRREEYDVLDKRRGRDPEMGGKPQRRKNPQEGLYNELQKDKMAEAYSEIGMKGERRRGKGHDGLYQGLSTATKDTYDALHMQALPPRRAKRSGSGATNFSLLKQAGDVEENPGPTSMDWIWRILFLVGAATGAHSFEQVQLQQPGAELVKPGASVKMSCKASGYAFSSYWINWMKQKPGQGLEWIGQIYPGDGDTNYNGKFKGRATLTADTSSSTAYMQLSSLTSEDSAVYFCARSITTVVGCAMDYWGQGTSVTVSSTRIQNPDPAVYQLRDSKSSDKSVCLFTDFDSQTNVSQSKDSDVYITDKTVLDMRSMDFKSNSAVAWSNKSDFACANAFNNSIIPEDTFFPSPESSCGTQSFGLLDPKLSYLLDGILFIYGVILTALFLWRRKRKEKQSETSPKEFLTIYEDVKDLKTRRNHEQEQTFPGGGSTIYSMIQSQSSAPTSQEPAYTLYSLIQPSRKSGSRKRNHSPSFNSTIYEVIGKSQPKAQNPARLSRKELENFDVYSSRRVKFSRSADAPAYQQGQNQLYNELNLGRREEYDVLDKRRGRDPEMGGKPQRRKNPQEGLYNELQKDKMAEAYSEIGMKGERRRGKGHDGLYQGLSTATKDTYDALHMQALPPRRAKRSGSGVKQTLNFDLLKLAGDVESNPGPGHMTEYKPTVRLATRDDVPRAVRTLAAAFADYPATRHTVDPDRHIERVTELQELFLTRVGLDIGKVWVADDGAAVAVWTTPESVEAGAVFAEIGPRMAELSGSRLAAQQQMEGLLAPHRPKEPAWFLATVGVSPDHQGKGLGSAVVLPGVEAAERAGVPAFLETSAPRNLPFYERLGFTVTADVEVPEGPRTWCMTRKPGA

SEQ ID NO: 10371 - protein, 999 aa, -Artificial-Sequence
MALPVTALLLPLALLLHAARPQVQLVESGGGLVQPGGSLRLSCAASGFTFTNHAMSWVRQAPGKGLELVSSISGNGRTTYYADSVKGRFTISRDISKNTLDLQMNSLRAEDTAVYYCAKDGGETLVDSRGQGTLVTVSSLEDLKNVFPPEVAVFEPSEAEISHTQKATLVCLATGFYPDHVELSWWVNGKEVHSGVSTDPQPLKEQPALNDSRYCLSSRLRVSATFWQNPRNHFRCQVQFYGLSENDEWTQDRAKPVTQIVSAEAWGRADCGSQSFGLLDPKLCYLLDGILFIYGVILTALFLRVKFSRSADAPAYQQGQNQLYNELNLGRREEYDVLDKRRGRDPEMGGKPQRRKNPQEGLYNELQKDKMAEAYSEIGMKGERRRGKGHDGLYQGLSTATKDTYDALHMQALPPRRAKRSGSGATNFSLLKQAGDVEENPGPTSMDWIWRILFLVGAATGAHSFEVQLVESGGGVVQPGRSLRLSCAASGFSFSGYGMHWVRQAPGKGLEWVAYISYDGSNKYYADSVKGRFTISRDNSKNTLYLQMNSLRAEDTAVYYCAKDPAWGLRLGESSSYDFDIWGQGTMVTVSSTRIQNPDPAVYQLRDSKSSDKSVCLFTDFDSQTNVSQSKDSDVYITDKTVLDMRSMDFKSNSAVAWSNKSDFACANAFNNSIIPEDTFFPSPESSCGTVVEKEHPQLGAGTVLLLRAGFYAVSFLSVAVGSTVYYQGKCLTWKGPRRQLPAVVPAPLPPPCGSSAHLLPPVPGGRAKRSGSGVKQTLNFDLLKLAGDVESNPGPSRGHMTEYKPTVRLATRDDVPRAVRTLAAAFADYPATRHTVDPDRHIERVTELQELFLTRVGLDIGKVWVADDGAAVAVWTTPESVEAGAVFAEIGPRMAELSGSRLAAQQQMEGLLAPHRPKEPAWFLATVGVSPDHQGKGLGSAVVLPGVEAAERAGVPAFLETSAPRNLPFYERLGFTVTADVEVPEGPRTWCMTRKPGA

SEQ ID NO: 10372 - protein, 1066 aa, -Artificial-Sequence
MALPVTALLLPLALLLHAARPQVQLVESGGGLVQPGGSLRLSCAASGFTFTNHAMSWVRQAPGKGLELVSSISGNGRTTYYADSVKGRFTISRDISKNTLDLQMNSLRAEDTAVYYCAKDGGETLVDSRGQGTLVTVSSLEDLKNVFPPEVAVFEPSEAEISHTQKATLVCLATGFYPDHVELSWWVNGKEVHSGVSTDPQPLKEQPALNDSRYCLSSRLRVSATFWQNPRNHFRCQVQFYGLSENDEWTQDRAKPVTQIVSAEAWGRADCGSQSFGLLDPKLCYLLDGILFIYGVILTALFLRVKFSRSADAPAYQQGQNQLYNELNLGRREEYDVLDKRRGRDPEMGGKPQRRKNPQEGLYNELQKDKMAEAYSEIGMKGERRRGKGHDGLYQGLSTATKDTYDALHMQALPPRRAKRSGSGATNFSLLKQAGDVEENPGPTSMDWIWRILFLVGAATGAHSFEVQLVESGGGVVQPGRSLRLSCAASGFSFSGYGMHWVRQAPGKGLEWVAYISYDGSNKYYADSVKGRFTISRDNSKNTLYLQMNSLRAEDTAVYYCAKDPAWGLRLGESSSYDFDIWGQGTMVTVSSTRIQNPDPAVYQLRDSKSSDKSVCLFTDFDSQTNVSQSKDSDVYITDKTVLDMRSMDFKSNSAVAWSNKSDFACANAFNNSIIPEDTFFPSPESSCGTQSFGLLDPKLCYLLDGILFIYGVILTALFLRVKFSRSADAPAYQQGQNQLYNELNLGRREEYDVLDKRRGRDPEMGGKPQRRKNPQEGLYNELQKDKMAEAYSEIGMKGERRRGKGHDGLYQGLSTATKDTYDALHMQALPPRRAKRSGSGVKQTLNFDLLKLAGDVESNPGPSRGHMTEYKPTVRLATRDDVPRAVRTLAAAFADYPATRHTVDPDRHIERVTELQELFLTRVGLDIGKVWVADDGAAVAVWTTPESVEAGAVFAEIGPRMAELSGSRLAAQQQMEGLLAPHRPKEPAWFLATVGVSPDHQGKGLGSAVVLPGVEAAERAGVPAFLETSAPRNLPFYERLGFTVTADVEVPEGPRTWCMTRKPGA

SEQ ID NO: 10373 - protein, 1079 aa, -Artificial-Sequence
MALPVTALLLPLALLLHAARPQVQLVESGGGLVQPGGSLRLSCAASGFTFTNHAMSWVRQAPGKGLELVSSISGNGRTTYYADSVKGRFTISRDISKNTLDLQMNSLRAEDTAVYYCAKDGGETLVDSRGQGTLVTVSSLEDLKNVFPPEVAVFEPSEAEISHTQKATLVCLATGFYPDHVELSWWVNGKEVHSGVSTDPQPLKEQPALNDSRYCLSSRLRVSATFWQNPRNHFRCQVQFYGLSENDEWTQDRAKPVTQIVSAEAWGRADCGSQSFGLLDPKLCYLLDGILFIYGVILTALFLRVKFSRSADAPAYQQGQNQLYNELNLGRREEYDVLDKRRGRDPEMGGKPQRRKNPQEGLYNELQKDKMAEAYSEIGMKGERRRGKGHDGLYQGLSTATKDTYDALHMQALPPRRAKRSGSGATNFSLLKQAGDVEENPGPTSMDWIWRILFLVGAATGAHSFEVQLVESGGGVVQPGRSLRLSCAASGFSFSGYGMHWVRQAPGKGLEWVAYISYDGSNKYYADSVKGRFTISRDNSKNTLYLQMNSLRAEDTAVYYCAKDPAWGLRLGESSSYDFDIWGQGTMVTVSSTRIQNPDPAVYQLRDSKSSDKSVCLFTDFDSQTNVSQSKDSDVYITDKTVLDMRSMDFKSNSAVAWSNKSDFACANAFNNSIIPEDTFFPSPESSCGTKSVRFYLVVSPASASTQTSWTPRDLVSSQTQTQSCVPPTAGARQAPESPSTIPVPSQPQNSTLRPGPAAPIALVPVFCGLLVAKSLVLSALLVWWGDIWWKTMMELRSLDTQKATCHLQQVTDLPWTSVSSPVEREILYHTVARTKISDDDDEHTLRAKRSGSGVKQTLNFDLLKLAGDVESNPGPSRGHMTEYKPTVRLATRDDVPRAVRTLAAAFADYPATRHTVDPDRHIERVTELQELFLTRVGLDIGKVWVADDGAAVAVWTTPESVEAGAVFAEIGPRMAELSGSRLAAQQQMEGLLAPHRPKEPAWFLATVGVSPDHQGKGLGSAVVLPGVEAAERAGVPAFLETSAPRNLPFYERLGFTVTADVEVPEGPRTWCMTRKPGA

SEQ ID NO: 10374 - protein, 1064 aa, -Artificial-Sequence
MALPVTALLLPLALLLHAARPQVQLVESGGGLVQPGGSLRLSCAASGFTFTNHAMSWVRQAPGKGLELVSSISGNGRTTYYADSVKGRFTISRDISKNTLDLQMNSLRAEDTAVYYCAKDGGETLVDSRGQGTLVTVSSLEGQPKANPTVTLFPPSSEELQANKATLVCLISDFYPGAVTVAWKADGSPVKAGVETTKPSKQSNNKYAASSYLSLTPEQWKSHRSYSCQVTHEGSTVEKTVAPTECSGSQSFGLLDPKLCYLLDGILFIYGVILTALFLRVKFSRSADAPAYQQGQNQLYNELNLGRREEYDVLDKRRGRDPEMGGKPQRRKNPQEGLYNELQKDKMAEAYSEIGMKGERRRGKGHDGLYQGLSTATKDTYDALHMQALPPRRAKRSGSGATNFSLLKQAGDVEENPGPTSMDWIWRILFLVGAATGAHSFEVQLVESGGGVVQPGRSLRLSCAASGFSFSGYGMHWVRQAPGKGLEWVAYISYDGSNKYYADSVKGRFTISRDNSKNTLYLQMNSLRAEDTAVYYCAKDPAWGLRLGESSSYDFDIWGQGTMVTVSSTRASTKGPSVFPLAPSSKSTSGGTAALGCLVKDYFPEPVTVSWNSGALTSGVHTFPAVLQSSGLYSLSSVVTVPSSSLGTQTYICNVNHKPSNTKVDKRVEPKSCGTKSVRFYLVVSPASASTQTSWTPRDLVSSQTQTQSCVPPTAGARQAPESPSTIPVPSQPQNSTLRPGPAAPIALVPVFCGLLVAKSLVLSALLVWWGDIWWKTMMELRSLDTQKATCHLQQVTDLPWTSVSSPVEREILYHTVARTKISDDDDEHTLRAKRSGSGVKQTLNFDLLKLAGDVESNPGPSRGHMTEYKPTVRLATRDDVPRAVRTLAAAFADYPATRHTVDPDRHIERVTELQELFLTRVGLDIGKVWVADDGAAVAVWTTPESVEAGAVFAEIGPRMAELSGSRLAAQQQMEGLLAPHRPKEPAWFLATVGVSPDHQGKGLGSAVVLPGVEAAERAGVPAFLETSAPRNLPFYERLGFTVTADVEVPEGPRTWCMTRKPGA

SEQ ID NO: 10375 - protein, 1051 aa, -Artificial-Sequence
MALPVTALLLPLALLLHAARPQVQLVESGGGLVQPGGSLRLSCAASGFTFTNHAMSWVRQAPGKGLELVSSISGNGRTTYYADSVKGRFTISRDISKNTLDLQMNSLRAEDTAVYYCAKDGGETLVDSRGQGTLVTVSSLEGQPKANPTVTLFPPSSEELQANKATLVCLISDFYPGAVTVAWKADGSPVKAGVETTKPSKQSNNKYAASSYLSLTPEQWKSHRSYSCQVTHEGSTVEKTVAPTECSGSQSFGLLDPKLCYLLDGILFIYGVILTALFLRVKFSRSADAPAYQQGQNQLYNELNLGRREEYDVLDKRRGRDPEMGGKPQRRKNPQEGLYNELQKDKMAEAYSEIGMKGERRRGKGHDGLYQGLSTATKDTYDALHMQALPPRRAKRSGSGATNFSLLKQAGDVEENPGPTSMDWIWRILFLVGAATGAHSFEVQLVESGGGVVQPGRSLRLSCAASGFSFSGYGMHWVRQAPGKGLEWVAYISYDGSNKYYADSVKGRFTISRDNSKNTLYLQMNSLRAEDTAVYYCAKDPAWGLRLGESSSYDFDIWGQGTMVTVSSTRASTKGPSVFPLAPSSKSTSGGTAALGCLVKDYFPEPVTVSWNSGALTSGVHTFPAVLQSSGLYSLSSVVTVPSSSLGTQTYICNVNHKPSNTKVDKRVEPKSCGTQSFGLLDPKLCYLLDGILFIYGVILTALFLRVKFSRSADAPAYQQGQNQLYNELNLGRREEYDVLDKRRGRDPEMGGKPQRRKNPQEGLYNELQKDKMAEAYSEIGMKGERRRGKGHDGLYQGLSTATKDTYDALHMQALPPRRAKRSGSGVKQTLNFDLLKLAGDVESNPGPSRGHMTEYKPTVRLATRDDVPRAVRTLAAAFADYPATRHTVDPDRHIERVTELQELFLTRVGLDIGKVWVADDGAAVAVWTTPESVEAGAVFAEIGPRMAELSGSRLAAQQQMEGLLAPHRPKEPAWFLATVGVSPDHQGKGLGSAVVLPGVEAAERAGVPAFLETSAPRNLPFYERLGFTVTADVEVPEGPRTWCMTRKPGA

SEQ ID NO: 10376 - protein, 796 aa, -Artificial-Sequence
MALPVTALLLPLALLLHAARPDIQMTQSPSSLSASVGDRVTITCKASDHINNWLAWYQQKPGQAPKLLIYGATTLETGVPSRFSGSGSGTDYTLTISSLQPEDFATYYCQQSWNTPWTFGQGTKLEIKRGGGGSGGGGSGGGGSQVQLQQPGAELVKPGASVKMSCKASGYAFSSYWINWMKQKPGQGLEWIGQIYPGDGDTNYNGKFKGRATLTADTSSSTAYMQLSSLTSEDSAVYFCARSITTVVGCAMDYWGQGTSVTVSSTREPKSCDKTHTCPPCPAPELLGGPSVFLFPPKPKDTLMISRTPEVTCVVVDVSHEDPEVKFNWYVDGVEVHNAKTKPREEQYNSTYRVVSVLTVLHQDWLNGKEYKCKVSNKALPAPIEKTISKAKGQPREPQVYTLPPSREEMTKNQVSLTCLVKGFYPSDIAVEWESNGQPENNYKTTPPVLDSDGSFFLYSKLTVDKSRWQQGNVFSCSVMHEALHNHYTQKSLSLSPGKGTITQGLAVSTISSFFPPGYQVSFCLVMVLLFAVDTGLYFSVKTNIRSSTRDWKDHKFKWRKDPQDKRAKRSGSGATNFSLLKQAGDVEENPGPSRGHMTEYKPTVRLATRDDVPRAVRTLAAAFADYPATRHTVDPDRHIERVTELQELFLTRVGLDIGKVWVADDGAAVAVWTTPESVEAGAVFAEIGPRMAELSGSRLAAQQQMEGLLAPHRPKEPAWFLATVGVSPDHQGKGLGSAVVLPGVEAAERAGVPAFLETSAPRNLPFYERLGFTVTADVEVPEGPRTWCMTRKPGA

SEQ ID NO: 10377 - protein, 922 aa, -Artificial-Sequence
MALPVTALLLPLALLLHAARPDIQMTQSPSSLSASVGDRVTITCKASDHINNWLAWYQQKPGQAPKLLIYGATTLETGVPSRFSGSGSGTDYTLTISSLQPEDFATYYCQQSWNTPWTFGQGTKLEIKRGGGGSGGGGSGGGGSQVQLQQPGAELVKPGASVKMSCKASGYAFSSYWINWMKQKPGQGLEWIGQIYPGDGDTNYNGKFKGRATLTADTSSSTAYMQLSSLTSEDSAVYFCARSITTVVGCAMDYWGQGTSVTVSSTREPKSCDKTHTCPPCPAPELLGGPSVFLFPPKPKDTLMISRTPEVTCVVVDVSHEDPEVKFNWYVDGVEVHNAKTKPREEQYNSTYRVVSVLTVLHQDWLNGKEYKCKVSNKALPAPIEKTISKAKGQPREPQVYTLPPSREEMTKNQVSLTCLVKGFYPSDIAVEWESNGQPENNYKTTPPVLDSDGSFFLYSKLTVDKSRWQQGNVFSCSVMHEALHNHYTQKSLSLSPGKGTTTPGERSSLPAFYPGTSGSCSGCGSLSLPLLAGLVAADAVASLLIVGAVFLCARPRRSPAQEDGKVYINMPGRGSSRRVKFSRSADAPAYQQGQNQLYNELNLGRREEYDVLDKRRGRDPEMGGKPQRRKNPQEGLYNELQKDKMAEAYSEIGMKGERRRGKGHDGLYQGLSTATKDTYDALHMQALPPRRAKRSGSGVKQTLNFDLLKLAGDVESNPGPGHMTEYKPTVRLATRDDVPRAVRTLAAAFADYPATRHTVDPDRHIERVTELQELFLTRVGLDIGKVWVADDGAAVAVWTTPESVEAGAVFAEIGPRMAELSGSRLAAQQQMEGLLAPHRPKEPAWFLATVGVSPDHQGKGLGSAVVLPGVEAAERAGVPAFLETSAPRNLPFYERLGFTVTADVEVPEGPRTWCMTRKPGA

SEQ ID NO: 10378 - protein, 818 aa, -Artificial-Sequence; identical to SEQ ID NO: 4702

SEQ ID NO: 10379 - protein, 794 aa, -Artificial-Sequence
MALPVTALLLPLALLLHAARPDIQMTQSPSSLSASVGDRVTITCKASDHINNWLAWYQQKPGQAPKLLIYGATTLETGVPSRFSGSGSGTDYTLTISSLQPEDFATYYCQQSWNTPWTFGQGTKLEIKRLEGQPKANPTVTLFPPSSEELQANKATLVCLISDFYPGAVTVAWKADGSPVKAGVETTKPSKQSNNKYAASSYLSLTPEQWKSHRSYSCQVTHEGSTVEKTVAPTECSGSQSFGLLDPKLCYLLDGILFIYGVILTALFLRVKFSRSADAPAYQQGQNQLYNELNLGRREEYDVLDKRRGRDPEMGGKPQRRKNPQEGLYNELQKDKMAEAYSEIGMKGERRRGKGHDGLYQGLSTATKDTYDALHMQALPPRRAKRSGSGATNFSLLKQAGDVEENPGPTSMDWIWRILFLVGAATGAHSFEQVQLQQPGAELVKPGASVKMSCKASGYAFSSYWINWMKQKPGQGLEWIGQIYPGDGDTNYNGKFKGRATLTADTSSSTAYMQLSSLTSEDSAVYFCARSITTVVGCAMDYWGQGTSVTVSSTRIQNPDPAVYQLRDSKSSDKSVCLFTDFDSQTNVSQSKDSDVYITDKTVLDMRSMDFKSNSAVAWSNKSDFACANAFNNSIIPEDTFFPSPESSCGTQSFGLLDPKLCYLLDGILFIYGVILTALFLRVKFSRSADAPAYQQGQNQLYNELNLGRREEYDVLDKRRGRDPEMGGKPQRRKNPQEGLYNELQKDKMAEAYSEIGMKGERRRGKGHDGLYQGLSTATKDTYDALHMQALPPR

SEQ ID NO: 10380 - protein, 864 aa, -Artificial-Sequence; identical to SEQ ID NO: 10343

SEQ ID NO: 10381 - protein, 609 aa, -Artificial-Sequence; identical to SEQ ID NO: 8385

SEQ ID NO: 10382 - protein, 735 aa, -Artificial-Sequence; identical to SEQ ID NO: 8386

SEQ ID NO: 10383 - protein, 612 aa, -Artificial-Sequence
MALPVTALLLPLALLLHAARPDIQMTQSPSSLSASVGDRVTITCKASDHINNWLAWYQQKPGQAPKLLIYGATTLETGVPSRFSGSGSGTDYTLTISSLQPEDFATYYCQQSWNTPWTFGQGTKLEIKRGGGGSGGGGSGGGGSQVQLQQPGAELVKPGASVKMSCKASGYAFSSYWINWMKQKPGQGLEWIGQIYPGDGDTNYNGKFKGRATLTADTSSSTAYMQLSSLTSEDSAVYFCARSITTVVGCAMDYWGQGTSVTVSSTRTTTPAPRPPTPAPTIASQPLSLRPEACRPAAGGAVHTRGLDFACDGSITQGLAVPTISSFFPPGYQVSFCLVMVLLFAVDTGLYFSVKTNIRSSTRDWKDHKFKWRKDPQDKRAKRSGSGVKQTLNFDLLKLAGDVESNPGPTRGHMTEYKPTVRLATRDDVPRAVRTLAAAFADYPATRHTVDPDRHIERVTELQELFLTRVGLDIGKVWVADDGAAVAVWTTPESVEAGAVFAEIGPRMAELSGSRLAAQQQMEGLLAPHRPKEPAWFLATVGVSPDHQGKGLGSAVVLPGVEAAERAGVPAFLETSAPRNLPFYERLGFTVTADVEVPEGPRTWCMTRKPGA

SEQ ID NO: 10384 - protein, 620 aa, -Artificial-Sequence
MALPVTALLLPLALLLHAARPDIQMTQSPSSLSASVGDRVTITCKASDHINNWLAWYQQKPGQAPKLLIYGATTLETGVPSRFSGSGSGTDYTLTISSLQPEDFATYYCQQSWNTPWTFGQGTKLEIKRGGGGSGGGGSGGGGSQVQLQQPGAELVKPGASVKMSCKASGYAFSSYWINWMKQKPGQGLEWIGQIYPGDGDTNYNGKFKGRATLTADTSSSTAYMQLSSLTSEDSAVYFCARSITTVVGCAMDYWGQGTSVTVSSTRTTTPAPRPPTPAPTIASQPLSLRPEACRPAAGGAVHTRGLDFACDGSVVEKEHPQLGAGTVLLLRAGFYAVSFLSVAVGSTVYYQGKCLTWKGPRRQLPAVVPAPLPPPCGSSAHLLPPVPGGRAKRSGSGATNFSLLKQAGDVEENPGPTRGHMTEYKPTVRLATRDDVPRAVRTLAAAFADYPATRHTVDPDRHIERVTELQELFLTRVGLDIGKVWVADDGAAVAVWTTPESVEAGAVFAEIGPRMAELSGSRLAAQQQMEGLLAPHRPKEPAWFLATVGVSPDHQGKGLGSAVVLPGVEAAERAGVPAFLETSAPRNLPFYERLGFTVTADVEVPEGPRTWCMTRKPGA

SEQ ID NO: 10385 - protein, 738 aa, -Artificial-Sequence; identical to SEQ ID NO: 8368

SEQ ID NO: 10386 - protein, 620 aa, -Artificial-Sequence; identical to SEQ ID NO: 10384

SEQ ID NO: 10387 - protein, 1049 aa, -Artificial-Sequence; identical to SEQ ID NO: 10356

SEQ ID NO: 10388 - protein, 969 aa, -Artificial-Sequence; identical to SEQ ID NO: 10357

SEQ ID NO: 10389 - protein, 998 aa, -Artificial-Sequence; identical to SEQ ID NO: 10358

SEQ ID NO: 10390 - protein, 1064 aa, -Artificial-Sequence; identical to SEQ ID NO: 10359

SEQ ID NO: 10391 - protein, 983 aa, -Artificial-Sequence; identical to SEQ ID NO: 10355

SEQ ID NO: 10392 - protein, 984 aa, -Artificial-Sequence; identical to SEQ ID NO: 10360

SEQ ID NO: 10393 - protein, 359 aa, -Artificial-Sequence; identical to SEQ ID NO: 9896

SEQ ID NO: 10394 - protein, 1015 aa, -Artificial-Sequence
MALPVTALLLPLALLLHAARPDIQMTQSPSSLSASVGDRVTITCKASDHINNWLAWYQQKPGQAPKLLIYGATTLETGVPSRFSGSGSGTDYTLTISSLQPEDFATYYCQQSWNTPWTFGQGTKLEIKRLEDLKNVFPPEVAVFEPSEAEISHTQKATLVCLATGFYPDHVELSWWVNGKEVHSGVSTDPQPLKEQPALNDSRYCLSSRLRVSATFWQNPRNHFRCQVQFYGLSENDEWTQDRAKPVTQIVSAEAWGRADCGSQSFGLLDPKLCYLLDGILFIYGVILTALFLRVKFSRSADAPAYQQGQNQLYNELNLGRREEYDVLDKRRGRDPEMGGKPQRRKNPQEGLYNELQKDKMAEAYSEIGMKGERRRGKGHDGLYQGLSTATKDTYDALHMQALPPRRAKRSGSGATNFSLLKQAGDVEENPGPTSMDWIWRILFLVGAATGAHSFEQVQLQQPGAELVKPGASVKMSCKASGYAFSSYWINWMKQKPGQGLEWIGQIYPGDGDTNYNGKFKGRATLTADTSSSTAYMQLSSLTSEDSAVYFCARSITTVVGCAMDYWGQGTSVTVSSTRASTKGPSVFPLAPSSKSTSGGTAALGCLVKDYFPEPVTVSWNSGALTSGVHTFPAVLQSSGLYSLSSVVTVPSSSLGTQTYICNVNHKPSNTKVDKRVEPKSCTTPGERSSLPAFYPGTSGSCSGCGSLSLPLLAGLVAADAVASLLIVGAVFLCARPRRSPAQEDGKVYINMPGRGRAKRSGSGVKQTLNFDLLKLAGDVESNPGPSRMYRMQLLSCIALSLALVTNSAPTSSSTKKTQLQLEHLLLDLQMILNGINNYKNPKLTRMLTFKFYMPKKATELKHLQCLEEELKPLEEVLNLAQSKNFHLRPRDLISNINVIVLELKGSETTFMCEYADETATIVEFLNRWITFCQSIISTLTARKIEVMYPPPYLDNEKSNGTIIHVKGKHLCPSPLFPGPSKPFWVLVVVGGVLACYSLLVTVAFIIFWVRSKRS

SEQ ID NO: 10395 - protein, 646 aa, -Artificial-Sequence
MALPVTALLLPLALLLHAARPDIQMTQSPSSLSASVGDRVTITCKASDHINNWLAWYQQKPGQAPKLLIYGATTLETGVPSRFSGSGSGTDYTLTISSLQPEDFATYYCQQSWNTPWTFGQGTKLEIKRGGGGSGGGGSGGGGSQVQLQQPGAELVKPGASVKMSCKASGYAFSSYWINWMKQKPGQGLEWIGQIYPGDGDTNYNGKFKGRATLTADTSSSTAYMQLSSLTSEDSAVYFCARSITTVVGCAMDYWGQGTSVTVSSTRTTTPAPRPPTPAPTIASQPLSLRPEACRPAAGGAVHTRGLDFACDGSVVEKEHPQLGAGTVLLLRAGFYAVSFLSVAVGSTVYYQGKCLTWKGPRRQLPAVVPAPLPPPCGSSAHLLPPVPGGRAKRSGSGATNFSLLKQAGDVEENPGPTRMYRMQLLSCIALSLALVTNSAPTSSSTKKTQLQLEHLLLDLQMILNGINNYKNPKLTRMLTFKFYMPKKATELKHLQCLEEELKPLEEVLNLAQSKNFHLRPRDLISNINVIVLELKGSETTFMCEYADETATIVEFLNRWITFCQSIISTLTARKIEVMYPPPYLDNEKSNGTIIHVKGKHLCPSPLFPGPSKPFWVLVVVGGVLACYSLLVTVAFIIFWVRSKRS

SEQ ID NO: 10396 - protein, 955 aa, -Artificial-Sequence; identical to SEQ ID NO: 10361

SEQ ID NO: 10397 - protein, 970 aa, -Artificial-Sequence; identical to SEQ ID NO: 10362

SEQ ID NO: 10398 - protein, 387 aa, -Artificial-Sequence
MALPVTALLLPLALLLHAARPEVQLVESGGGLVQAGGSLRLSCAASGRTFSMGWFRQAPGKEREFVAAITYSGGSPYYADSVKGRFTISRDNAKNTVYLQMNSLKPEDTAVYYCAANPTYGSDWNAENWGQGTQVTVSSGTGGGGSGGGGSGGGGSEFDIQMTQSPSSLSASVGDRVTITCKASDHINNWLAWYQQKPGQAPKLLIYGATTLETGVPSRFSGSGSGTDYTLTISSLQPEDFATYYCQQSWNTPWTFGQGTKLEIKRLEKIEVMYPPPYLDNEKSNGTIIHVKGSVEKEHPQLGAGTVLLLRAGFYAVSFLSVAVWWGDIWWKTMMELRSLDTQKATCHLQQVTDLPWTSVSSPVEREILYHTVARTKISDDDDEHTL

SEQ ID NO: 10399 - protein, 387 aa, -Artificial-Sequence; identical to SEQ ID NO: 10398

SEQ ID NO: 10400 - protein, 505 aa, -Artificial-Sequence
MSKQRGTFSEVSLAQDPKWQQRKPKGNKSSISGTEQEIFQVELNLQNASLNHQGIDKIYDCQGLLPPPEKLTAEVLGIICIVLMATVLKTIVLIPFLEQNNSSPNARTQKARHCGHCPEEWITYSNSCYYIGKERRTWEESLQACASKNSSSLLCIDNEEEMKFLASILPSSWIGVFRNSSHHPWVTINGLAFKHEIKDSDHAERNCAMLHVRGLISDQCGSSRIIRRGFIMLTRLVLNSGGGGSGGGGSGGGGSEFDIVMTQSPATLSLSPGERATLSCRSSKSLQNVNGNTYLYWFQQKPGQSPQLLIYRMSNLNSGVPDRFSGSGSGTEFTLTISSLEPEDFAVYYCMQHLEYPITFGAGTKLEIKGGGGSGGGGSGGGGSEVQLVESGGGLVKPGGSLKLSCAASGYTFTSYVMHWVRQAPGKGLEWIGYINPYNDGTKYNEKFQGRVTISSDKSISTAYMELSSLRSEDTAMYYCARGTYYYGTRVFDYWGQGTLVTVSS

SEQ ID NO: 10401 - protein, 423 aa, -Artificial-Sequence
MNKQRGTYSEVSLAQDPKRQQRKLKGNKSSISGTKQEIFQVELNLQNASSDHQGNDKTYHCKGLLPPPEKLTAEVLGIICIVLMATVLKTIVLIPCIGVLEQNSFSLNRRMQKARHCGHCPEEWITYSNSCYYIGKERRTWEERVCWPVLRRTLICFLGGGGSGGGGSGGGGSEFDIVMTQSPATLSLSPGERATLSCRSSKSLQNVNGNTYLYWFQQKPGQSPQLLIYRMSNLNSGVPDRFSGSGSGTEFTLTISSLEPEDFAVYYCMQHLEYPITFGAGTKLEIKGGGGSGGGGSGGGGSEVQLVESGGGLVKPGGSLKLSCAASGYTFTSYVMHWVRQAPGKGLEWIGYINPYNDGTKYNEKFQGRVTISSDKSISTAYMELSSLRSEDTAMYYCARGTYYYGTRVFDYWGQGTLVTVSS

SEQ ID NO: 10402 - protein, 522 aa, -Artificial-Sequence
MNKQRGTFSEVSLAQDPKPQQRKPKGNKSSISGTEQEIFQVELNLQNASLNHQGIDKIYDCQGLLPPPEKLTAEVLGIICIVLMATVLKTIVLIPFLEQNNSSPNTRTQKARPCGHCPEEWITYSNSCYYIGKERRTWEESLQACASKNSSSLLSIDNEEEMKFLASILPSSWIGVFRNSSHHPWVTINGLAFKHEIKDSDHAERNCAMLHVRGLISDQCGSSRIIVSISFRIKALELAVHQIKFYICSNRNDIMIAGGGGSGGGGSGGGGSEFDIVMTQSPATLSLSPGERATLSCRSSKSLQNVNGNTYLYWFQQKPGQSPQLLIYRMSNLNSGVPDRFSGSGSGTEFTLTISSLEPEDFAVYYCMQHLEYPITFGAGTKLEIKGGGGSGGGGSGGGGSEVQLVESGGGLVKPGGSLKLSCAASGYTFTSYVMHWVRQAPGKGLEWIGYINPYNDGTKYNEKFQGRVTISSDKSISTAYMELSSLRSEDTAMYYCARGTYYYGTRVFDYWGQGTLVTVSS

SEQ ID NO: 10403 - protein, 498 aa, -Artificial-Sequence
MDNQGVIYSDLNLPPNPKRQQRKPKGNKSSILATEQEITYAELNLQKASQDFQGNDKTYHCKDLPSAPEKLIVGILGIICLILMASVVTIVVIPSTLIQRHNNSSLNTRTQKARHCGHCPEEWITYSNSCYYIGKERRTWEESLLACTSKNSSLLSIDNEEEMKFLSIISPSSWIGVFRNSSHHPWVTMNGLAFKHEIKDSDNAELNCAVLQVNRLKSAQCGSSIIYHCKHKLGGGGSGGGGSGGGGSEFDIVMTQSPATLSLSPGERATLSCRSSKSLQNVNGNTYLYWFQQKPGQSPQLLIYRMSNLNSGVPDRFSGSGSGTEFTLTISSLEPEDFAVYYCMQHLEYPITFGAGTKLEIKGGGGSGGGGSGGGGSEVQLVESGGGLVKPGGSLKLSCAASGYTFTSYVMHWVRQAPGKGLEWIGYINPYNDGTKYNEKFQGRVTISSDKSISTAYMELSSLRSEDTAMYYCARGTYYYGTRVFDYWGQGTLVTVSS

SEQ ID NO: 10404 - protein, 522 aa, -Artificial-Sequence
MALPVTALLLPLALLLHAARPDIQMTQSPSSLSASVGDRVTITCKASDHINNWLAWYQQKPGQAPKLLIYGATTLETGVPSRFSGSGSGTDYTLTISSLQPEDFATYYCQQSWNTPWTFGQGTKLEIKRGGGGSGGGGSGGGGSQVQLQQPGAELVKPGASVKMSCKASGYAFSSYWINWMKQKPGQGLEWIGQIYPGDGDTNYNGKFKGRATLTADTSSSTAYMQLSSLTSEDSAVYFCARSITTVVGCAMDYWGQGTSVTVSSTRKIEVMYPPPYLDNEKSNGTIIHVKGGTVVFLEPQWYRVLEKDSVTLKCQGAYSPEDNSTQWFHNESLISSQASSYFIDAATVDDSGEYRCQTNLSTLSDPVQLEVHIGWLLLQAPRWVFKEEDPIHLRCHSWKNTALHKVTYLQNGKGRKYFHHNSDFYIPKATLKDSGSYFCRGLVGSKNVSSETVNITITQGLAVPTISSFFPPGYQVSFCLVMVLLFAVDTGLYFSVKTNIRSSTRDWKDHKFKWRKDPQDK

SEQ ID NO: 10405 - protein, 391 aa, -Artificial-Sequence
MALPVTALLLPLALLLHAARPDIQMTQSPSSLSASVGDRVTITCKASDHINNWLAWYQQKPGQAPKLLIYGATTLETGVPSRFSGSGSGTDYTLTISSLQPEDFATYYCQQSWNTPWTFGQGTKLEIKRGGGGSGGGGSGGGGSQVQLQQPGAELVKPGASVKMSCKASGYAFSSYWINWMKQKPGQGLEWIGQIYPGDGDTNYNGKFKGRATLTADTSSSTAYMQLSSLTSEDSAVYFCARSITTVVGCAMDYWGQGTSVTVSSTRKIEVMYPPPYLDNEKSNGTIIHVKGGTLQVLGLQLPTPVWFHVLFYLAVGIMFLVNTVLWVTIRKELKRKKKWDLEISLDSGHEKKVISSLQEDRHLEEELKCQEQKEEQLQEGVHRKEPQGAT

SEQ ID NO: 10406 - protein, 391 aa, -Artificial-Sequence
MALPVTALLLPLALLLHAARPDIQMTQSPSSLSASVGDRVTITCKASDHINNWLAWYQQKPGQAPKLLIYGATTLETGVPSRFSGSGSGTDYTLTISSLQPEDFATYYCQQSWNTPWTFGQGTKLEIKRGGGGSGGGGSGGGGSQVQLQQPGAELVKPGASVKMSCKASGYAFSSYWINWMKQKPGQGLEWIGQIYPGDGDTNYNGKFKGRATLTADTSSSTAYMQLSSLTSEDSAVYFCARSITTVVGCAMDYWGQGTSVTVSSTRKIEVMYPPPYLDNEKSNGTIIHVKGGTVQAPSSSPMGIIVAVVTGIAVAAIVAAVVALIYCRKKRISALPGYPECREMGETLPEKPANPTNPDEADKVGAENTITYSLLMHPDALEEPDDQNRI

SEQ ID NO: 10407 - protein, 407 aa, -Artificial-Sequence
MALPVTALLLPLALLLHAARPDIQMTQSPSSLSASVGDRVTITCKASDHINNWLAWYQQKPGQAPKLLIYGATTLETGVPSRFSGSGSGTDYTLTISSLQPEDFATYYCQQSWNTPWTFGQGTKLEIKRGGGGSGGGGSGGGGSQVQLQQPGAELVKPGASVKMSCKASGYAFSSYWINWMKQKPGQGLEWIGQIYPGDGDTNYNGKFKGRATLTADTSSSTAYMQLSSLTSEDSAVYFCARSITTVVGCAMDYWGQGTSVTVSSTRLWVSQPPEIRTLEGSSAFLPCSFNASQGRLAIGSVTWFRDEVVPGKEVRNGTPEFRGRLAPLASSRFLHDHQAELHIRDVRGHDASIYVCRVEVLGLGVGTGNGTRLVVEKEHPQLGAGTVLLLRAGFYAVSFLSVAVGS

SEQ ID NO: 10408 - protein, 627 aa, -Artificial-Sequence; identical to SEQ ID NO: 6648

SEQ ID NO: 10409 - protein, 515 aa, -Artificial-Sequence
MALPVTALLLPLALLLHAARPDIQMTQSPSSLSASVGDRVTITCKASDHINNWLAWYQQKPGQAPKLLIYGATTLETGVPSRFSGSGSGTDYTLTISSLQPEDFATYYCQQSWNTPWTFGQGTKLEIKRGGGGSGGGGSGGGGSQVQLQQPGAELVKPGASVKMSCKASGYAFSSYWINWMKQKPGQGLEWIGQIYPGDGDTNYNGKFKGRATLTADTSSSTAYMQLSSLTSEDSAVYFCARSITTVVGCAMDYWGQGTSVTVSSTRQEGVHRKPSFLALPGHLVKSEETVILQCWSDVMFEHFLLHREGKFNNTLHLIGEHHDGVSKANFSIGPMMPVLAGTYRCYGSVPHSPYQLSAPSDPLDMVIIGLYEKPSLSAQPGPTVQAGENVTLSCSSRSSYDMYHLSREGEAHERRLPAVRSINGTFQADFPLGPATHGGTYRCFGSFRDAPYEWSNSSDPLLVSVTGNPSNSWPSPTEPSSKTGNPRHLHVLIGTSVVKIPFTILLFFLLHRWC

SEQ ID NO: 10410 - protein, 378 aa, -Artificial-Sequence
MALPVTALLLPLALLLHAARPDIQMTQSPSSLSASVGDRVTITCKASDHINNWLAWYQQKPGQAPKLLIYGATTLETGVPSRFSGSGSGTDYTLTISSLQPEDFATYYCQQSWNTPWTFGQGTKLEIKRGGGGSGGGGSGGGGSQVQLQQPGAELVKPGASVKMSCKASGYAFSSYWINWMKQKPGQGLEWIGQIYPGDGDTNYNGKFKGRATLTADTSSSTAYMQLSSLTSEDSAVYFCARSITTVVGCAMDYWGQGTSVTVSSTRTTTPAPRPPTPAPTIASQPLSLRPEACRPAAGGAVHTRGLDFACDIYIWAPLAGTCGVLLLSLVITLYCKRGRKKLLYIFKQPFMRPVQTTQEEDGCSCRFPEEEEGGCEL

SEQ ID NO: 10411 - protein, 559 aa, -Artificial-Sequence
MALPVTALLLPLALLLHAARPDIQMTQSPSSLSASVGDRVTITCKASDHINNWLAWYQQKPGQAPKLLIYGATTLETGVPSRFSGSGSGTDYTLTISSLQPEDFATYYCQQSWNTPWTFGQGTKLEIKRGGGGSGGGGSGGGGSQVQLQQPGAELVKPGASVKMSCKASGYAFSSYWINWMKQKPGQGLEWIGQIYPGDGDTNYNGKFKGRATLTADTSSSTAYMQLSSLTSEDSAVYFCARSITTVVGCAMDYWGQGTSVTVSSTRGMRTEDLPKAVVFLEPQWYRVLEKDSVTLKCQGAYSPEDNSTQWFHNESLISSQASSYFIDAATVDDSGEYRCQTNLSTLSDPVQLEVHIGWLLLQAPRWVFKEEDPIHLRCHSWKNTALHKVTYLQNGKGRKYFHHNSDFYIPKATLKDSGSYFCRGLVGSKNVSSETVNITITQGLAVSTISSFFPPGYQVSFCLVMVLLFAVDTGLYFSVKGSVVEKEHPQLGAGTVLLLRAGFYAVSFLSVAVGSTVYYQGKCLTWKGPRRQLPAVVPAPLPPPCGSSAHLLPPVPGG

SEQ ID NO: 10412 - protein, 554 aa, -Artificial-Sequence
MALPVTALLLPLALLLHAARPDIQMTQSPSSLSASVGDRVTITCKASDHINNWLAWYQQKPGQAPKLLIYGATTLETGVPSRFSGSGSGTDYTLTISSLQPEDFATYYCQQSWNTPWTFGQGTKLEIKRGGGGSGGGGSGGGGSQVQLQQPGAELVKPGASVKMSCKASGYAFSSYWINWMKQKPGQGLEWIGQIYPGDGDTNYNGKFKGRATLTADTSSSTAYMQLSSLTSEDSAVYFCARSITTVVGCAMDYWGQGTSVTVSSTRDLPKAVVFLEPQWYRVLEKDSVTLKCQGAYSPEDNSTQWFHNESLISSQASSYFIDAATVDDSGEYRCQTNLSTLSDPVQLEVHIGWLLLQAPRWVFKEEDPIHLRCHSWKNTALHKVTYLQNGKGRKYFHHNSDFYIPKATLKDSGSYFCRGLVGSKNVSSETVNITITQGLAVSTISSFFPPGYQVSFCLVMVLLFAVDTGLYFSVKGSVVEKEHPQLGAGTVLLLRAGFYAVSFLSVAVGSTVYYQGKCLTWKGPRRQLPAVVPAPLPPPCGSSAHLLPPVPGG

SEQ ID NO: 10413 - protein, 483 aa, -Artificial-Sequence
MALPVTALLLPLALLLHAARPDIQMTQSPSSLSASVGDRVTITCKASDHINNWLAWYQQKPGQAPKLLIYGATTLETGVPSRFSGSGSGTDYTLTISSLQPEDFATYYCQQSWNTPWTFGQGTKLEIKRGGGGSGGGGSGGGGSQVQLQQPGAELVKPGASVKMSCKASGYAFSSYWINWMKQKPGQGLEWIGQIYPGDGDTNYNGKFKGRATLTADTSSSTAYMQLSSLTSEDSAVYFCARSITTVVGCAMDYWGQGTSVTVSSTRLWVSQPPEIRTLEGSSAFLPCSFNASQGRLAIGSVTWFRDEVVPGKEVRNGTPEFRGRLAPLASSRFLHDHQAELHIRDVRGHDASIYVCRVEVLGLGVGTGNGTRLVVEKEHPQLGAGTVLLLRAGFYAVSFLSVAVGSVVEKEHPQLGAGTVLLLRAGFYAVSFLSVAVGSTVYYQGKCLTWKGPRRQLPAVVPAPLPPPCGSSAHLLPPVPGG

SEQ ID NO: 10414 - protein, 801 aa, -Artificial-Sequence
MALPVTALLLPLALLLHAARPDIQMTQSPSSLSASVGDRVTITCKASDHINNWLAWYQQKPGQAPKLLIYGATTLETGVPSRFSGSGSGTDYTLTISSLQPEDFATYYCQQSWNTPWTFGQGTKLEIKRGGGGSGGGGSGGGGSQVQLQQPGAELVKPGASVKMSCKASGYAFSSYWINWMKQKPGQGLEWIGQIYPGDGDTNYNGKFKGRATLTADTSSSTAYMQLSSLTSEDSAVYFCARSITTVVGCAMDYWGQGTSVTVSSTRAKPTTTPAPRPPTPAPTIASQPLSLRPEACRPAAGGAVHTRGLDFACDSNLFVASWIAVMIIFRIGMAVAIFCCFFFPSWRRKRKEKQSETSPKEFLTIYEDVKDLKTRRNHEQEQTFPGGGSTIYSMIQSQSSAPTSQEPAYTLYSLIQPSRKSGSRKRNHSPSFNSTIYEVIGKSQPKAQNPARLSRKELENFDVYSRVKFSRSADAPAYQQGQNQLYNELNLGRREEYDVLDKRRGRDPEMGGKPRRKNPQEGLYNELQKDKMAEAYSEIGMKGERRRGKGHDGLYQGLSTATKDTYDALHMQALPPRSSGSGEGRGSLLTCGDVEENPGPHMTEYKPTVRLATRDDVPRAVRTLAAAFADYPATRHTVDPDRHIERVTELQELFLTRVGLDIGKVWVADDGAAVAVWTTPESVEAGAVFAEIGPRMAELSGSRLAAQQQMEGLLAPHRPKEPAWFLATVGVSPDHQGKGLGSAVVLPGVEAAERAGVPAFLETSAPRNLPFYERLGFTVTADVEVPEGPRTWCMTRKPGA

SEQ ID NO: 10415 - protein, 783 aa, -Artificial-Sequence
MALPVTALLLPLALLLHAARPDIQMTQSPSSLSASVGDRVTITCKASDHINNWLAWYQQKPGQAPKLLIYGATTLETGVPSRFSGSGSGTDYTLTISSLQPEDFATYYCQQSWNTPWTFGQGTKLEIKRGGGGSGGGGSGGGGSQVQLQQPGAELVKPGASVKMSCKASGYAFSSYWINWMKQKPGQGLEWIGQIYPGDGDTNYNGKFKGRATLTADTSSSTAYMQLSSLTSEDSAVYFCARSITTVVGCAMDYWGQGTSVTVSSTRQEGVHRKPSFLALPGHLVKSEETVILQCWSDVMFEHFLLHREGKFNNTLHLIGEHHDGVSKANFSIGPMMPVLAGTYRCYGSVPHSPYQLSAPSDPLDMVIIGLYEKPSLSAQPGPTVQAGENVTLSCSSRSSYDMYHLSREGEAHERRLPAVRSINGTFQADFPLGPATHGGTYRCFGSFRDAPYEWSNSSDPLLVSVTGNPSNSWPSPTEPSSKTGNPRHLHVLIGTSVVKIPFTILLFFLLHRWCSDKKNAAVMDQEPAGNRTVNSEDSDEQDHQEVSYARAKRSGSGVKQTLNFDLLKLAGDVESNPGPSRGHMTEYKPTVRLATRDDVPRAVRTLAAAFADYPATRHTVDPDRHIERVTELQELFLTRVGLDIGKVWVADDGAAVAVWTTPESVEAGAVFAEIGPRMAELSGSRLAAQQQMEGLLAPHRPKEPAWFLATVGVSPDHQGKGLGSAVVLPGVEAAERAGVPAFLETSAPRNLPFYERLGFTVTADVEVPEGPRTWCMTRKPGA

SEQ ID NO: 10416 - protein, 490 aa, -Artificial-Sequence
MALPVTALLLPLALLLHAARPQVQLVESGGGLVQPGGSLRLSCAASGFTFTNHAMSWVRQAPGKGLELVSSISGNGRTTYYADSVKGRFTISRDISKNTLDLQMNSLRAEDTAVYYCAKDGGETLVDSRGQGTLVTVSSLEKIEVMYPPPYLDNEKSNGTIIHVKGSVEKEHPQLGAGTVLLLRAGFYAVSFLSVAVWWGDIWWKTMMELRSLDTQKATCHLQQVTDLPWTSVSSPVEREILYHTVARTKISDDDDEHTLRAKRSGSGATNFSLLKQAGDVEENPGPTRGHMTEYKPTVRLATRDDVPRAVRTLAAAFADYPATRHTVDPDRHIERVTELQELFLTRVGLDIGKVWVADDGAAVAVWTTPESVEAGAVFAEIGPRMAELSGSRLAAQQQMEGLLAPHRPKEPAWFLATVGVSPDHQGKGLGSAVVLPGVEAAERAGVPAFLETSAPRNLPFYERLGFTVTADVEVPEGPRTWCMTRKPGA

SEQ ID NO: 10417 - protein, 796 aa, -Artificial-Sequence; identical to SEQ ID NO: 10376

SEQ ID NO: 10418 - protein, 603 aa, -Artificial-Sequence
MALPVTALLLPLALLLHAARPDIQMTQSPSSLSASVGDRVTITCKASDHINNWLAWYQQKPGQAPKLLIYGATTLETGVPSRFSGSGSGTDYTLTISSLQPEDFATYYCQQSWNTPWTFGQGTKLEIKRGGGGSGGGGSGGGGSQVQLQQPGAELVKPGASVKMSCKASGYAFSSYWINWMKQKPGQGLEWIGQIYPGDGDTNYNGKFKGRATLTADTSSSTAYMQLSSLTSEDSAVYFCARSITTVVGCAMDYWGQGTSVTVSSTRKIEVMYPPPYLDNEKSNGTIIHVKGGTVVEKEHPQLGAGTVLLLRAGFYAVSFLSVAVGSTVYYQGKCLTWKGPRRQLPAVVPAPLPPPCGSSAHLLPPVPGGRAKRSGSGMKQTLNFDLLKLAGDVESNPGPSRGHMTEYKPTVRLATRDDVPRAVRTLAAAFADYPATRHTVDPDRHIERVTELQELFLTRVGLDIGKVWVADDGAAVAVWTTPESVEAGAVFAEIGPRMAELSGSRLAAQQQMEGLLAPHRPKEPAWFLATVGVSPDHQGKGLGSAVVLPGVEAAERAGVPAFLETSAPRNLPFYERLGFTVTADVEVPEGPRTWCMTRKPGA

SEQ ID NO: 10419 - protein, 589 aa, -Artificial-Sequence
MALPVTALLLPLALLLHAARPDIQMTQSPSSLSASVGDRVTITCKASDHINNWLAWYQQKPGQAPKLLIYGATTLETGVPSRFSGSGSGTDYTLTISSLQPEDFATYYCQQSWNTPWTFGQGTKLEIKRGGGGSGGGGSGGGGSQVQLQQPGAELVKPGASVKMSCKASGYAFSSYWINWMKQKPGQGLEWIGQIYPGDGDTNYNGKFKGRATLTADTSSSTAYMQLSSLTSEDSAVYFCARSITTVVGCAMDYWGQGTSVTVSSTRKIEVMYPPPYLDNEKSNGTIIHVKGGTITQGLAVSTISSFFPPGYQVSFCLVMVLLFAVDTGLYFSVKTNIRSSTRDWKDHKFKWRKDPQDKRAKRSGSGATNFSLLKQAGDVEENPGPSRGHMTEYKPTVRLATRDDVPRAVRTLAAAFADYPATRHTVDPDRHIERVTELQELFLTRVGLDIGKVWVADDGAAVAVWTTPESVEAGAVFAEIGPRMAELSGSRLAAQQQMEGLLAPHRPKEPAWFLATVGVSPDHQGKGLGSAVVLPGVEAAERAGVPAFLETSAPRNLPFYERLGFTVTADVEVPEGPRTWCMTRKPGA

SEQ ID NO: 10420 - protein, 617 aa, -Artificial-Sequence
MALPVTALLLPLALLLHAARPDIQMTQSPSSLSASVGDRVTITCKASDHINNWLAWYQQKPGQAPKLLIYGATTLETGVPSRFSGSGSGTDYTLTISSLQPEDFATYYCQQSWNTPWTFGQGTKLEIKRGGGGSGGGGSGGGGSQVQLQQPGAELVKPGASVKMSCKASGYAFSSYWINWMKQKPGQGLEWIGQIYPGDGDTNYNGKFKGRATLTADTSSSTAYMQLSSLTSEDSAVYFCARSITTVVGCAMDYWGQGTSVTVSSTRKIEVMYPPPYLDNEKSNGTIIHVKGGTGDIENTSLAPEDPTFPADTWGTYLLTTETGLQKDHALWDHTAQNLLRMGLAFLVLVALVWFLVEDWLSRKRTRERASRASTWEGRRRLNTQTLRAKRSGSGATNFSLLKQAGDVEENPGPSRGHMTEYKPTVRLATRDDVPRAVRTLAAAFADYPATRHTVDPDRHIERVTELQELFLTRVGLDIGKVWVADDGAAVAVWTTPESVEAGAVFAEIGPRMAELSGSRLAAQQQMEGLLAPHRPKEPAWFLATVGVSPDHQGKGLGSAVVLPGVEAAERAGVPAFLETSAPRNLPFYERLGFTVTADVEVPEGPRTWCMTRKPGA

SEQ ID NO: 10421 - protein, 917 aa, -Artificial-Sequence
MALPVTALLLPLALLLHAARPDIQMTQSPSSLSASVGDRVTITCKASDHINNWLAWYQQKPGQAPKLLIYGATTLETGVPSRFSGSGSGTDYTLTISSLQPEDFATYYCQQSWNTPWTFGQGTKLEIKRLEDLKNVFPPEVAVFEPSEAEISHTQKATLVCLATGFYPDHVELSWWVNGKEVHSGVSTDPQPLKEQPALNDSRYCLSSRLRVSATFWQNPRNHFRCQVQFYGLSENDEWTQDRAKPVTQIVSAEAWGRADCGSVVEKEHPQLGAGTVLLLRAGFYAVSFLSVAVGSTVYYQGKCLTWKGPRRQLPAVVPAPLPPPCGSSAHLLPPVPGGRAKRSGSGATNFSLLKQAGDVEENPGPTSMDWIWRILFLVGAATGAHSFEQVQLQQPGAELVKPGASVKMSCKASGYAFSSYWINWMKQKPGQGLEWIGQIYPGDGDTNYNGKFKGRATLTADTSSSTAYMQLSSLTSEDSAVYFCARSITTVVGCAMDYWGQGTSVTVSSTRIQNPDPAVYQLRDSKSSDKSVCLFTDFDSQTNVSQSKDSDVYITDKTVLDMRSMDFKSNSAVAWSNKSDFACANAFNNSIIPEDTFFPSPESSCGTVVEKEHPQLGAGTVLLLRAGFYAVSFLSVAVGSTVYYQGKCLTWKGPRRQLPAVVPAPLPPPCGSSAHLLPPVPGGRAKRSGSGVKQTLNFDLLKLAGDVESNPGPSRGHMTEYKPTVRLATRDDVPRAVRTLAAAFADYPATRHTVDPDRHIERVTELQELFLTRVGLDIGKVWVADDGAAVAVWTTPESVEAGAVFAEIGPRMAELSGSRLAAQQQMEGLLAPHRPKEPAWFLATVGVSPDHQGKGLGSAVVLPGVEAAERAGVPAFLETSAPRNLPFYERLGFTVTADVEVPEGPRTWCMTRKPGA

SEQ ID NO: 10422 - protein, 903 aa, -Artificial-Sequence
MALPVTALLLPLALLLHAARPDIQMTQSPSSLSASVGDRVTITCKASDHINNWLAWYQQKPGQAPKLLIYGATTLETGVPSRFSGSGSGTDYTLTISSLQPEDFATYYCQQSWNTPWTFGQGTKLEIKRLEDLKNVFPPEVAVFEPSEAEISHTQKATLVCLATGFYPDHVELSWWVNGKEVHSGVSTDPQPLKEQPALNDSRYCLSSRLRVSATFWQNPRNHFRCQVQFYGLSENDEWTQDRAKPVTQIVSAEAWGRADCGSVVEKEHPQLGAGTVLLLRAGFYAVSFLSVAVGSTVYYQGKCLTWKGPRRQLPAVVPAPLPPPCGSSAHLLPPVPGGRAKRSGSGATNFSLLKQAGDVEENPGPTSMDWIWRILFLVGAATGAHSFEQVQLQQPGAELVKPGASVKMSCKASGYAFSSYWINWMKQKPGQGLEWIGQIYPGDGDTNYNGKFKGRATLTADTSSSTAYMQLSSLTSEDSAVYFCARSITTVVGCAMDYWGQGTSVTVSSTRIQNPDPAVYQLRDSKSSDKSVCLFTDFDSQTNVSQSKDSDVYITDKTVLDMRSMDFKSNSAVAWSNKSDFACANAFNNSIIPEDTFFPSPESSCGTITQGLAVSTISSFFPPGYQVSFCLVMVLLFAVDTGLYFSVKTNIRSSTRDWKDHKFKWRKDPQDKRAKRSGSGATNFSLLKQAGDVEENPGPSRGHMTEYKPTVRLATRDDVPRAVRTLAAAFADYPATRHTVDPDRHIERVTELQELFLTRVGLDIGKVWVADDGAAVAVWTTPESVEAGAVFAEIGPRMAELSGSRLAAQQQMEGLLAPHRPKEPAWFLATVGVSPDHQGKGLGSAVVLPGVEAAERAGVPAFLETSAPRNLPFYERLGFTVTADVEVPEGPRTWCMTRKPGA

SEQ ID NO: 10423 - protein, 1104 aa, -Artificial-Sequence
MALPVTALLLPLALLLHAARPDIQMTQSPSSLSASVGDRVTITCKASDHINNWLAWYQQKPGQAPKLLIYGATTLETGVPSRFSGSGSGTDYTLTISSLQPEDFATYYCQQSWNTPWTFGQGTKLEIKRLEDLKNVFPPEVAVFEPSEAEISHTQKATLVCLATGFYPDHVELSWWVNGKEVHSGVSTDPQPLKEQPALNDSRYCLSSRLRVSATFWQNPRNHFRCQVQFYGLSENDEWTQDRAKPVTQIVSAEAWGRADCGSVVEKEHPQLGAGTVLLLRAGFYAVSFLSVAVGSTVYYQGKCLTWKGPRRQLPAVVPAPLPPPCGSSAHLLPPVPGGRAKRSGSGATNFSLLKQAGDVEENPGPTSMDWIWRILFLVGAATGAHSFEQVQLQQPGAELVKPGASVKMSCKASGYAFSSYWINWMKQKPGQGLEWIGQIYPGDGDTNYNGKFKGRATLTADTSSSTAYMQLSSLTSEDSAVYFCARSITTVVGCAMDYWGQGTSVTVSSTRIQNPDPAVYQLRDSKSSDKSVCLFTDFDSQTNVSQSKDSDVYITDKTVLDMRSMDFKSNSAVAWSNKSDFACANAFNNSIIPEDTFFPSPESSCGTQSFGLLDPKLSYLLDGILFIYGVILTALFLWRRKRKEKQSETSPKEFLTIYEDVKDLKTRRNHEQEQTFPGGGSTIYSMIQSQSSAPTSQEPAYTLYSLIQPSRKSGSRKRNHSPSFNSTIYEVIGKSQPKAQNPARLSRKELENFDVYSSRRVKFSRSADAPAYQQGQNQLYNELNLGRREEYDVLDKRRGRDPEMGGKPQRRKNPQEGLYNELQKDKMAEAYSEIGMKGERRRGKGHDGLYQGLSTATKDTYDALHMQALPPRRAKRSGSGVKQTLNFDLLKLAGDVESNPGPGHMTEYKPTVRLATRDDVPRAVRTLAAAFADYPATRHTVDPDRHIERVTELQELFLTRVGLDIGKVWVADDGAAVAVWTTPESVEAGAVFAEIGPRMAELSGSRLAAQQQMEGLLAPHRPKEPAWFLATVGVSPDHQGKGLGSAVVLPGVEAAERAGVPAFLETSAPRNLPFYERLGFTVTADVEVPEGPRTWCMTRKPGA

SEQ ID NO: 10424 - protein, 1089 aa, -Artificial-Sequence
MALPVTALLLPLALLLHAARPDIQMTQSPSSLSASVGDRVTITCKASDHINNWLAWYQQKPGQAPKLLIYGATTLETGVPSRFSGSGSGTDYTLTISSLQPEDFATYYCQQSWNTPWTFGQGTKLEIKRLEGQPKANPTVTLFPPSSEELQANKATLVCLISDFYPGAVTVAWKADGSPVKAGVETTKPSKQSNNKYAASSYLSLTPEQWKSHRSYSCQVTHEGSTVEKTVAPTECSGSQSFGLLDPKLSYLLDGILFIYGVILTALFLWRRKRKEKQSETSPKEFLTIYEDVKDLKTRRNHEQEQTFPGGGSTIYSMIQSQSSAPTSQEPAYTLYSLIQPSRKSGSRKRNHSPSFNSTIYEVIGKSQPKAQNPARLSRKELENFDVYSTSRVKFSRSADAPAYQQGQNQLYNELNLGRREEYDVLDKRRGRDPEMGGKPQRRKNPQEGLYNELQKDKMAEAYSEIGMKGERRRGKGHDGLYQGLSTATKDTYDALHMQALPPRRAKRSGSGATNFSLLKQAGDVEENPGPMDWIWRILFLVGAATGAHSFEQVQLQQPGAELVKPGASVKMSCKASGYAFSSYWINWMKQKPGQGLEWIGQIYPGDGDTNYNGKFKGRATLTADTSSSTAYMQLSSLTSEDSAVYFCARSITTVVGCAMDYWGQGTSVTVSSTRASTKGPSVFPLAPSSKSTSGGTAALGCLVKDYFPEPVTVSWNSGALTSGVHTFPAVLQSSGLYSLSSVVTVPSSSLGTQTYICNVNHKPSNTKVDKRVEPKSCGTVVEKEHPQLGAGTVLLLRAGFYAVSFLSVAVGSTVYYQGKCLTWKGPRRQLPAVVPAPLPPPCGSSAHLLPPVPGGRAKRSGSGVKQTLNFDLLKLAGDVESNPGPSRGHMTEYKPTVRLATRDDVPRAVRTLAAAFADYPATRHTVDPDRHIERVTELQELFLTRVGLDIGKVWVADDGAAVAVWTTPESVEAGAVFAEIGPRMAELSGSRLAAQQQMEGLLAPHRPKEPAWFLATVGVSPDHQGKGLGSAVVLPGVEAAERAGVPAFLETSAPRNLPFYERLGFTVTADVEVPEGPRTWCMTRKPGA

SEQ ID NO: 10425 - protein, 880 aa, -Artificial-Sequence
MALPVTALLLPLALLLHAARPDIQMTQSPSSLSASVGDRVTITCKASDHINNWLAWYQQKPGQAPKLLIYGATTLETGVPSRFSGSGSGTDYTLTISSLQPEDFATYYCQQSWNTPWTFGQGTKLEIKRLEGQPKANPTVTLFPPSSEELQANKATLVCLISDFYPGAVTVAWKADGSPVKAGVETTKPSKQSNNKYAASSYLSLTPEQWKSHRSYSCQVTHEGSTVEKTVAPTECSGSITQGLAVPTISSFFPPGYQVSFCLVMVLLFAVDTGLYFSVKTNIRSSTRDWKDHKFKWRKDPQDKRAKRSGSGVKQTLNFDLLKLAGDVESNPGPTSMDWIWRILFLVGAATGAHSFEQVQLQQPGAELVKPGASVKMSCKASGYAFSSYWINWMKQKPGQGLEWIGQIYPGDGDTNYNGKFKGRATLTADTSSSTAYMQLSSLTSEDSAVYFCARSITTVVGCAMDYWGQGTSVTVSSTRASTKGPSVFPLAPSSKSTSGGTAALGCLVKDYFPEPVTVSWNSGALTSGVHTFPAVLQSSGLYSLSSVVTVPSSSLGTQTYICNVNHKPSNTKVDKRVEPKSCGTITQGLAVSTISSFFPPGYQVSFCLVMVLLFAVDTGLYFSVKTNIRSSTRDWKDHKFKWRKDPQDKRAKRSGSGATNFSLLKQAGDVEENPGPSRGHMTEYKPTVRLATRDDVPRAVRTLAAAFADYPATRHTVDPDRHIERVTELQELFLTRVGLDIGKVWVADDGAAVAVWTTPESVEAGAVFAEIGPRMAELSGSRLAAQQQMEGLLAPHRPKEPAWFLATVGVSPDHQGKGLGSAVVLPGVEAAERAGVPAFLETSAPRNLPFYERLGFTVTADVEVPEGPRTWCMTRKPGA

SEQ ID NO: 10426 - protein, 816 aa, -Artificial-Sequence
MALPVTALLLPLALLLHAARPDIQMTQSPSSLSASVGDRVTITCKASDHINNWLAWYQQKPGQAPKLLIYGATTLETGVPSRFSGSGSGTDYTLTISSLQPEDFATYYCQQSWNTPWTFGQGTKLEIKRGGGGSGGGGSGGGGSQVQLQQPGAELVKPGASVKMSCKASGYAFSSYWINWMKQKPGQGLEWIGQIYPGDGDTNYNGKFKGRATLTADTSSSTAYMQLSSLTSEDSAVYFCARSITTVVGCAMDYWGQGTSVTVSSTRKIEVMYPPPYLDNEKSNGTIIHVKGARKSVRFYLVVSPASASTQTSWTPRDLVSSQTQTQSCVPPTAGARQAPESPSTIPVPSQPQNSTLRPGPAAPIALVPVFCGLLVAKSLVLSALLVWWGDIWWKTMMELRSLDTQKATCHLQQVTDLPWTSVSSPVEREILYHTVARTKISDDDDEHTLRAKRSGSGVKQTLNFDLLKLAGDVESNPGPSRMYRMQLLSCIALSLALVTNSAPTSSSTKKTQLQLEHLLLDLQMILNGINNYKNPKLTRMLTFKFYMPKKATELKHLQCLEEELKPLEEVLNLAQSKNFHLRPRDLISNINVIVLELKGSETTFMCEYADETATIVEFLNRWITFCQSIISTLTHMACHQLCARGHCWGPGPTQCVNCSQFLRGQECVEECRVLQGLPREYVNARHCLPCHPECQPQNGSVTCFGPEADQCVACAHYKDPPFCVARCPSGVKPDLSYMPIWKFPDEEGACQPCPINCTHSCVDLDDKGCPAEQRASPLTSIISAVVGILLVVVLGVVFGILIKRRQQKIRKYTMR

SEQ ID NO: 10427 - protein, 1276 aa, -Artificial-Sequence
MALPVTALLLPLALLLHAARPDIQMTQSPSSLSASVGDRVTITCKASDHINNWLAWYQQKPGQAPKLLIYGATTLETGVPSRFSGSGSGTDYTLTISSLQPEDFATYYCQQSWNTPWTFGQGTKLEIKRLEGQPKANPTVTLFPPSSEELQANKATLVCLISDFYPGAVTVAWKADGSPVKAGVETTKPSKQSNNKYAASSYLSLTPEQWKSHRSYSCQVTHEGSTVEKTVAPTECSGSQSFGLLDPKLSYLLDGILFIYGVILTALFLWRRKRKEKQSETSPKEFLTIYEDVKDLKTRRNHEQEQTFPGGGSTIYSMIQSQSSAPTSQEPAYTLYSLIQPSRKSGSRKRNHSPSFNSTIYEVIGKSQPKAQNPARLSRKELENFDVYSTSRVKFSRSADAPAYQQGQNQLYNELNLGRREEYDVLDKRRGRDPEMGGKPQRRKNPQEGLYNELQKDKMAEAYSEIGMKGERRRGKGHDGLYQGLSTATKDTYDALHMQALPPRRAKRSGSGATNFSLLKQAGDVEENPGPMDWIWRILFLVGAATGAHSFEQVQLQQPGAELVKPGASVKMSCKASGYAFSSYWINWMKQKPGQGLEWIGQIYPGDGDTNYNGKFKGRATLTADTSSSTAYMQLSSLTSEDSAVYFCARSITTVVGCAMDYWGQGTSVTVSSTRASTKGPSVFPLAPSSKSTSGGTAALGCLVKDYFPEPVTVSWNSGALTSGVHTFPAVLQSSGLYSLSSVVTVPSSSLGTQTYICNVNHKPSNTKVDKRVEPKSCGTQSFGLLDPKLSYLLDGILFIYGVILTALFLWRRKRKEKQSETSPKEFLTIYEDVKDLKTRRNHEQEQTFPGGGSTIYSMIQSQSSAPTSQEPAYTLYSLIQPSRKSGSRKRNHSPSFNSTIYEVIGKSQPKAQNPARLSRKELENFDVYSSRRVKFSRSADAPAYQQGQNQLYNELNLGRREEYDVLDKRRGRDPEMGGKPQRRKNPQEGLYNELQKDKMAEAYSEIGMKGERRRGKGHDGLYQGLSTATKDTYDALHMQALPPRRAKRSGSGVKQTLNFDLLKLAGDVESNPGPGHMTEYKPTVRLATRDDVPRAVRTLAAAFADYPATRHTVDPDRHIERVTELQELFLTRVGLDIGKVWVADDGAAVAVWTTPESVEAGAVFAEIGPRMAELSGSRLAAQQQMEGLLAPHRPKEPAWFLATVGVSPDHQGKGLGSAVVLPGVEAAERAGVPAFLETSAPRNLPFYERLGFTVTADVEVPEGPRTWCMTRKPGA

SEQ ID NO: 10428 - protein, 888 aa, -Artificial-Sequence
MALPVTALLLPLALLLHAARPDIQMTQSPSSLSASVGDRVTITCKASDHINNWLAWYQQKPGQAPKLLIYGATTLETGVPSRFSGSGSGTDYTLTISSLQPEDFATYYCQQSWNTPWTFGQGTKLEIKRLEGQPKANPTVTLFPPSSEELQANKATLVCLISDFYPGAVTVAWKADGSPVKAGVETTKPSKQSNNKYAASSYLSLTPEQWKSHRSYSCQVTHEGSTVEKTVAPTECSGSVVEKEHPQLGAGTVLLLRAGFYAVSFLSVAVGSTVYYQGKCLTWKGPRRQLPAVVPAPLPPPCGSSAHLLPPVPGGRAKRSGSGATNFSLLKQAGDVEENPGPTSMDWIWRILFLVGAATGAHSFEQVQLQQPGAELVKPGASVKMSCKASGYAFSSYWINWMKQKPGQGLEWIGQIYPGDGDTNYNGKFKGRATLTADTSSSTAYMQLSSLTSEDSAVYFCARSITTVVGCAMDYWGQGTSVTVSSTRASTKGPSVFPLAPSSKSTSGGTAALGCLVKDYFPEPVTVSWNSGALTSGVHTFPAVLQSSGLYSLSSVVTVPSSSLGTQTYICNVNHKPSNTKVDKRVEPKSCGTITQGLAVSTISSFFPPGYQVSFCLVMVLLFAVDTGLYFSVKTNIRSSTRDWKDHKFKWRKDPQDKRAKRSGSGATNFSLLKQAGDVEENPGPSRGHMTEYKPTVRLATRDDVPRAVRTLAAAFADYPATRHTVDPDRHIERVTELQELFLTRVGLDIGKVWVADDGAAVAVWTTPESVEAGAVFAEIGPRMAELSGSRLAAQQQMEGLLAPHRPKEPAWFLATVGVSPDHQGKGLGSAVVLPGVEAAERAGVPAFLETSAPRNLPFYERLGFTVTADVEVPEGPRTWCMTRKPGA

SEQ ID NO: 10429 - protein, 622 aa, -Artificial-Sequence
MALPVTALLLPLALLLHAARPQIVLSQSPAILSASPGEKVTMTCRASSSVSYMHWYQQKPGSSPKPWIYATSNLASGVPARFSGSGSGTSYSFTISRVEAEDAATYYCQQWTFNPPTFGGGTRLEIKRTVAAGGGGSGGGGSGGGGSQAYLQQSGAELVRPGASVKMSCKASGYTFTSYNMHWVKQTPRQGLEWIGGIYPGNGDTSYNQKFKGKATLTVGKSSSTAYMQLSSLTSEDSAVYFCARYDYNYAMDYWGQGTSVTVSSASTRGGLEKIEVMYPPPYLDNEKSNGTIIHVKGSVEKEHPQLGAGTVLLLRAGFYAVSFLSVAVWWGDIWWKTMMELRSLDTQKATCHLQQVTDLPWTSVSSPVEREILYHTVARTKISDDDDEHTLRAKRSGSGATNFSLLKQAGDVEENPGPTRGHMTEYKPTVRLATRDDVPRAVRTLAAAFADYPATRHTVDPDRHIERVTELQELFLTRVGLDIGKVWVADDGAAVAVWTTPESVEAGAVFAEIGPRMAELSGSRLAAQQQMEGLLAPHRPKEPAWFLATVGVSPDHQGKGLGSAVVLPGVEAAERAGVPAFLETSAPRNLPFYERLGFTVTADVEVPEGPRTWCMTRKPGA

SEQ ID NO: 10430 - protein, 615 aa, -Artificial-Sequence
MALPVTALLLPLALLLHAARPDEIVLTQSPATLSLSPGERATLSCSASSSVSYMHWYQQKPGQAPRLLIYDTSKLASGIPARFSGSGSGTDFTLTISSLEPEDVAVYYCFQGSVYPFTFGQGTKLEIKRGGGGSGGGGSGGGGSQVQLQESGPGLVKPSQTLSLTCTVSGGSISTSGMGVGWIRQHPGKGLEWIGHIWWDDDKRYNPALKSRVTISVDTSKNQFSLKLSSVTAADTAVYYCARMELWSYYFDYWGQGTLVTVSSLEKIEVMYPPPYLDNEKSNGTIIHVKGSVEKEHPQLGAGTVLLLRAGFYAVSFLSVAVWWGDIWWKTMMELRSLDTQKATCHLQQVTDLPWTSVSSPVEREILYHTVARTKISDDDDEHTLRAKRSGSGATNFSLLKQAGDVEENPGPTRGHMTEYKPTVRLATRDDVPRAVRTLAAAFADYPATRHTVDPDRHIERVTELQELFLTRVGLDIGKVWVADDGAAVAVWTTPESVEAGAVFAEIGPRMAELSGSRLAAQQQMEGLLAPHRPKEPAWFLATVGVSPDHQGKGLGSAVVLPGVEAAERAGVPAFLETSAPRNLPFYERLGFTVTADVEVPEGPRTWCMTRKPGA

SEQ ID NO: 10431 - protein, 526 aa, -Artificial-Sequence
MALPVTALLLPLALLLHAARPDIQMTQSPSSLSASVGDRVTITCKASDHINNWLAWYQQKPGQAPKLLIYGATTLETGVPSRFSGSGSGTDYTLTISSLQPEDFATYYCQQSWNTPWTFGQGTKLEIKRGGGGSGGGGSGGGGSQVQLQQPGAELVKPGASVKMSCKASGYAFSSYWINWMKQKPGQGLEWIGQIYPGDGDTNYNGKFKGRATLTADTSSSTAYMQLSSLTSEDSAVYFCARSITTVVGCAMDYWGQGTSVTVSSTRKIEVMYPPPYLDNEKSNGTIIHVKGGTLPKAVVFLEPQWYRVLEKDSVTLKCQGAYSPEDNSTQWFHNESLISSQASSYFIDAATVDDSGEYRCQTNLSTLSDPVQLEVHIGWLLLQAPRWVFKEEDPIHLRCHSWKNTALHKVTYLQNGKGRKYFHHNSDFYIPKATLKDSGSYFCRGLVGSKNVSSETVNITITQGLAVPTISSFFPPGYQVSFCLVMVLLFAVDTGLYFSVKTNIRSSTRDWKDHKFKWRKDPQDK

SEQ ID NO: 10432 - protein, 878 aa, -Artificial-Sequence
MALPVTALLLPLALLLHAARPACEVQLLESGGGLIQPGGSLRLSCAASGFTFSSHAMTWVRQAPGKGLEWVSAISGSGDYTHYADSVKGRFTISRDNSKNTVYLQMNSLRAEDSAVYYCAKDEDGGSLLGHRGQGTLVTVSSGTGGGGSGGGGSGGGGSEFDIQMTQSPSSLSASVGDRVTITCRASQDVNTAVAWYQQKPGKAPKLLIYSASFLYSGVPSRFSGSRSGTDFTLTISSLQPEDFATYYCQQAYTTPPTFGQGTKVEIKRTGGGGSGGGGSGGGGSEVQLVESGGGLVQPGGSLRLSCAASGFNIKDTYIHWVRQAPGKGLEWVARIYPTNGYTRYADSVKGRFTISADTSKNTAYLQMNSLRAEDTAVYYCSRWGGAGAYAMDVWGQGTLVTVSSTRGMRTEDLPKAVVFLEPQWYRVLEKDSVTLKCQGAYSPEDNSTQWFHNESLISSQASSYFIDAATVDDSGEYRCQTNLSTLSDPVQLEVHIGWLLLQAPRWVFKEEDPIHLRCHSWKNTALHKVTYLQNGKGRKYFHHNSDFYIPKATLKDSGSYFCRGLVGSKNVSSETVNITITQGLAVPTISSFFPPGYQVSFCLVMVLLFAVDTGLYFSVKTNIRSSTRDWKDHKFKWRKDPQDKRAKRSGSGVKQTLNFDLLKLAGDVESNPGPSRGHMTEYKPTVRLATRDDVPRAVRTLAAAFADYPATRHTVDPDRHIERVTELQELFLTRVGLDIGKVWVADDGAAVAVWTTPESVEAGAVFAEIGPRMAELSGSRLAAQQQMEGLLAPHRPKEPAWFLATVGVSPDHQGKGLGSAVVLPGVEAAERAGVPAFLETSAPRNLPFYERLGFTVTADVEVPEGPRTWCMTRKPGA

SEQ ID NO: 10433 - protein, 742 aa, -Artificial-Sequence
MALPVTALLLPLALLLHAARPEVQLVESGGGLVQPGGSLRLSCTFSGGTFSSYTMGWFRQAPGKEREFVAEVRWGGVTTYSNSLKDRFSISEDSVKNAVYLQMNSLKPEDTAVYYCAAVRQMYMTVVPDYWGQGTLVTVSSLESGGGGSFEVQLLESGGGLIQPGGSLRLSCAASGFTFSSHAMTWVRQAPGKGLEWVSAISGSGDYTHYADSVKGRFTISRDNSKNTVYLQMNSLRAEDSAVYYCAKDEDGGSLLGHRGQGTLVTVSSTRGMRTEDLPKAVVFLEPQWYRVLEKDSVTLKCQGAYSPEDNSTQWFHNESLISSQASSYFIDAATVDDSGEYRCQTNLSTLSDPVQLEVHIGWLLLQAPRWVFKEEDPIHLRCHSWKNTALHKVTYLQNGKGRKYFHHNSDFYIPKATLKDSGSYFCRGLVGSKNVSSETVNITITQGLAVPTISSFFPPGYQVSFCLVMVLLFAVDTGLYFSVKTNIRSSTRDWKDHKFKWRKDPQDKRAKRSGSGVKQTLNFDLLKLAGDVESNPGPSRGHMTEYKPTVRLATRDDVPRAVRTLAAAFADYPATRHTVDPDRHIERVTELQELFLTRVGLDIGKVWVADDGAAVAVWTTPESVEAGAVFAEIGPRMAELSGSRLAAQQQMEGLLAPHRPKEPAWFLATVGVSPDHQGKGLGSAVVLPGVEAAERAGVPAFLETSAPRNLPFYERLGFTVTADVEVPEGPRTWCMTRKPGA

SEQ ID NO: 10434 - protein, 740 aa, -Artificial-Sequence
MALPVTALLLPLALLLHAARPQLQLQESGPGLVKPSETLSLTCTVSGDSISSGDYYWGWIRQPPGKGLEWIGHIYYSGVTYYNPSLKSRVTISVDTSRNQFSLKLSSVTAADTAVYYCTREDSSNWRSRGQGTLVTVSSLESGGGGSFEVQLVESGGGLVQPGGSLRLSCAASGFNIKDTCIGWVRRAPGKEEELVADICPYKGSTRYADSVKGRFTISADTSKNTAYLQMNSLRAEDTAVYYCAIVSARDGYYNYWGQGTTVTVSSTRGMRTEDLPKAVVFLEPQWYRVLEKDSVTLKCQGAYSPEDNSTQWFHNESLISSQASSYFIDAATVDDSGEYRCQTNLSTLSDPVQLEVHIGWLLLQAPRWVFKEEDPIHLRCHSWKNTALHKVTYLQNGKGRKYFHHNSDFYIPKATLKDSGSYFCRGLVGSKNVSSETVNITITQGLAVPTISSFFPPGYQVSFCLVMVLLFAVDTGLYFSVKTNIRSSTRDWKDHKFKWRKDPQDKRAKRSGSGVKQTLNFDLLKLAGDVESNPGPSRGHMTEYKPTVRLATRDDVPRAVRTLAAAFADYPATRHTVDPDRHIERVTELQELFLTRVGLDIGKVWVADDGAAVAVWTTPESVEAGAVFAEIGPRMAELSGSRLAAQQQMEGLLAPHRPKEPAWFLATVGVSPDHQGKGLGSAVVLPGVEAAERAGVPAFLETSAPRNLPFYERLGFTVTADVEVPEGPRTWCMTRKPGA

SEQ ID NO: 10435 - protein, 748 aa, -Artificial-Sequence
MALPVTALLLPLALLLHAARPQLQLQESGPGLVKPSETLSLTCTVSGDSISSGDYYWGWIRQPPGKGLEWIGHIYYSGVTYYNPSLKSRVTISVDTSRNQFSLKLSSVTAADTAVYYCTREDSSNWRSRGQGTLVTVSSLESGGGGSFEVQLVESGGGVVQPGRSLRLSCAASGFSFSGYGMHWVRQAPGKGLEWVAYISYDGSNKYYADSVKGRFTISRDNSKNTLYLQMNSLRAEDTAVYYCAKDPAWGLRLGESSSYDFDIWGQGTMVTVSSTRGMRTEDLPKAVVFLEPQWYRVLEKDSVTLKCQGAYSPEDNSTQWFHNESLISSQASSYFIDAATVDDSGEYRCQTNLSTLSDPVQLEVHIGWLLLQAPRWVFKEEDPIHLRCHSWKNTALHKVTYLQNGKGRKYFHHNSDFYIPKATLKDSGSYFCRGLVGSKNVSSETVNITITQGLAVPTISSFFPPGYQVSFCLVMVLLFAVDTGLYFSVKTNIRSSTRDWKDHKFKWRKDPQDKRAKRSGSGVKQTLNFDLLKLAGDVESNPGPSRGHMTEYKPTVRLATRDDVPRAVRTLAAAFADYPATRHTVDPDRHIERVTELQELFLTRVGLDIGKVWVADDGAAVAVWTTPESVEAGAVFAEIGPRMAELSGSRLAAQQQMEGLLAPHRPKEPAWFLATVGVSPDHQGKGLGSAVVLPGVEAAERAGVPAFLETSAPRNLPFYERLGFTVTADVEVPEGPRTWCMTRKPGA

SEQ ID NO: 10436 - protein, 584 aa, -Artificial-Sequence
MALPVTALLLPLALLLHAARPMLPAPKNLVVSRITEDSARLSWTAPDAAFDSFPIRYIETLIWGEAIWLDVPGSERSYDLTGLKPGTEYAVVITGVKGGRFSSPLVASFTTTRGMRTEDLPKAVVFLEPQWYRVLEKDSVTLKCQGAYSPEDNSTQWFHNESLISSQASSYFIDAATVDDSGEYRCQTNLSTLSDPVQLEVHIGWLLLQAPRWVFKEEDPIHLRCHSWKNTALHKVTYLQNGKGRKYFHHNSDFYIPKATLKDSGSYFCRGLVGSKNVSSETVNITITQGLAVPTISSFFPPGYQVSFCLVMVLLFAVDTGLYFSVKTNIRSSTRDWKDHKFKWRKDPQDKRAKRSGSGVKQTLNFDLLKLAGDVESNPGPSRGHMTEYKPTVRLATRDDVPRAVRTLAAAFADYPATRHTVDPDRHIERVTELQELFLTRVGLDIGKVWVADDGAAVAVWTTPESVEAGAVFAEIGPRMAELSGSRLAAQQQMEGLLAPHRPKEPAWFLATVGVSPDHQGKGLGSAVVLPGVEAAERAGVPAFLETSAPRNLPFYERLGFTVTADVEVPEGPRTWCMTRKPGA

SEQ ID NO: 10437 - protein, 940 aa, -Artificial-Sequence
MALPVTALLLPLALLLHAARPACDEGGGGSMGSWSEFWVRLGAIRERLDALGGSEAELAAFEKEIAAFESELQAYKGKGNPEVEKLRYTAATIRRFLQAYRHNGTGGGGSGGGGSGGGGSGLEKCFQTENPLECQDKGEEELQKYIQESQALAKRSCGLFQKLGEYYLQNAFLVAYTKKAPQLTSSELMAITRKMAATAATCCQLSEDKLLACGEGAADIIIGHLCIRHEMTPVNPGVGQCCTSSYANRRPCFSSLVVDETYVPPAFSDDKFIFHKDLCQAQGVALQTMKQEFLINLVKQKPQITEEQLEAVIADFSGLLEKCCQGQEQEVCFAEEGQKLISKTRAALGVGGGGSGGGGSGGGGSGPMGSWDEFGRRLYAIEWRLYALGGSEAELAAFEKEIAAFESELQAYKGKGNPEVEKLREIAAVIRSNLQAYRHNGSGGGGSGGGGSGGGGSHHHHHHHHHHTRGMRTEDLPKAVVFLEPQWYRVLEKDSVTLKCQGAYSPEDNSTQWFHNESLISSQASSYFIDAATVDDSGEYRCQTNLSTLSDPVQLEVHIGWLLLQAPRWVFKEEDPIHLRCHSWKNTALHKVTYLQNGKGRKYFHHNSDFYIPKATLKDSGSYFCRGLVGSKNVSSETVNITITQGLAVPTISSFFPPGYQVSFCLVMVLLFAVDTGLYFSVKTNIRSSTRDWKDHKFKWRKDPQDKRAKRSGSGVKQTLNFDLLKLAGDVESNPGPSRGHMTEYKPTVRLATRDDVPRAVRTLAAAFADYPATRHTVDPDRHIERVTELQELFLTRVGLDIGKVWVADDGAAVAVWTTPESVEAGAVFAEIGPRMAELSGSRLAAQQQMEGLLAPHRPKEPAWFLATVGVSPDHQGKGLGSAVVLPGVEAAERAGVPAFLETSAPRNLPFYERLGFTVTADVEVPEGPRTWCMTRKPGA

SEQ ID NO: 10438 - protein, 545 aa, -Artificial-Sequence
MDWIWRILFLVGAATGAHSEFMDPDLEIRAAFLRQRNTALRTEVAELEQEVQRLENEVSQYETRYGPLGGGKTRGMRTEDLPKAVVFLEPQWYRVLEKDSVTLKCQGAYSPEDNSTQWFHNESLISSQASSYFIDAATVDDSGEYRCQTNLSTLSDPVQLEVHIGWLLLQAPRWVFKEEDPIHLRCHSWKNTALHKVTYLQNGKGRKYFHHNSDFYIPKATLKDSGSYFCRGLVGSKNVSSETVNITITQGLAVPTISSFFPPGYQVSFCLVMVLLFAVDTGLYFSVKTNIRSSTRDWKDHKFKWRKDPQDKRAKRSGSGVKQTLNFDLLKLAGDVESNPGPSRGHMTEYKPTVRLATRDDVPRAVRTLAAAFADYPATRHTVDPDRHIERVTELQELFLTRVGLDIGKVWVADDGAAVAVWTTPESVEAGAVFAEIGPRMAELSGSRLAAQQQMEGLLAPHRPKEPAWFLATVGVSPDHQGKGLGSAVVLPGVEAAERAGVPAFLETSAPRNLPFYERLGFTVTADVEVPEGPRTWCMTRKPGA

SEQ ID NO: 10439 - protein, 768 aa, -Artificial-Sequence
MALPVTALLLPLALLLHAARPDIQMTQSPSSLSASVGDRVTITCKASDHINNWLAWYQQKPGQAPKLLIYGATTLETGVPSRFSGSGSGTDYTLTISSLQPEDFATYYCQQSWNTPWTFGQGTKLEIKRGGGGSGGGGSGGGGSQVQLQQPGAELVKPGASVKMSCKASGYAFSSYWINWMKQKPGQGLEWIGQIYPGDGDTNYNGKFKGRATLTADTSSSTAYMQLSSLTSEDSAVYFCARSITTVVGCAMDYWGQGTSVTVSSTRTPAAPPKAVLKLEPQWINVLQEDSVTLTCRGTHSPESDSIQWFHNGNLIPTHTQPSYRFKANNNDSGEYTCQTGQTSLSDPVHLTVLSEWLVLQTPHLEFQEGETIVLRCHSWKDKPLVKVTFFQNGKSKKFSRSDPNFSIPQANHSHSGDYHCTGNIGYTLYSSKPVTITVQAPSSSPMGIIVAVVTGIAVAAIVAAVVALIYCRKKRISALPGYPECREMGETLPEKPANPTNPDEADKVGAENTITYSLLMHPDALEEPDDQNRIRAKRSGSGVKQTLNFDLLKLAGDVESNPGPSRGHMTEYKPTVRLATRDDVPRAVRTLAAAFADYPATRHTVDPDRHIERVTELQELFLTRVGLDIGKVWVADDGAAVAVWTTPESVEAGAVFAEIGPRMAELSGSRLAAQQQMEGLLAPHRPKEPAWFLATVGVSPDHQGKGLGSAVVLPGVEAAERAGVPAFLETSAPRNLPFYERLGFTVTADVEVPEGPRTWCMTRKPGA

SEQ ID NO: 10440 - protein, 614 aa, -Artificial-Sequence
MALPVTALLLPLALLLHAARPDIQMTQTTSSLSASLGDRVTISCRASQDISKYLNWYQQKPDGTVKLLIYHTSRLHSGVPSRFSGSGSGTDYSLTISNLEQEDIATYFCQQGNTLPYTFGGGTKLEITGGGGSGGGGSGGGGSEVKLQESGPGLVAPSQSLSVTCTVSGVSLPDYGVSWIRQPPRKGLEWLGVIWGSETTYYNSALKSRLTIIKDNSKSQVFLKMNSLQTDDTAIYYCAKHYYYGGSYAMDYWGQGTSVTVSSLEKIEVMYPPPYLDNEKSNGTIIHVKGSVEKEHPQLGAGTVLLLRAGFYAVSFLSVAVWWGDIWWKTMMELRSLDTQKATCHLQQVTDLPWTSVSSPVEREILYHTVARTKISDDDDEHTLRAKRSGSGATNFSLLKQAGDVEENPGPTRGHMTEYKPTVRLATRDDVPRAVRTLAAAFADYPATRHTVDPDRHIERVTELQELFLTRVGLDIGKVWVADDGAAVAVWTTPESVEAGAVFAEIGPRMAELSGSRLAAQQQMEGLLAPHRPKEPAWFLATVGVSPDHQGKGLGSAVVLPGVEAAERAGVPAFLETSAPRNLPFYERLGFTVTADVEVPEGPRTWCMTRKPGA

SEQ ID NO: 10441 - protein, 799 aa, -Artificial-Sequence
MALPVTALLLPLALLLHAARPDIQMTQSPSSLSASVGDRVTITCKASDHINNWLAWYQQKPGQAPKLLIYGATTLETGVPSRFSGSGSGTDYTLTISSLQPEDFATYYCQQSWNTPWTFGQGTKLEIKRGGGGSGGGGSGGGGSQVQLQQPGAELVKPGASVKMSCKASGYAFSSYWINWMKQKPGQGLEWIGQIYPGDGDTNYNGKFKGRATLTADTSSSTAYMQLSSLTSEDSAVYFCARSITTVVGCAMDYWGQGTSVTVSSTRKIEVMYPPPYLDNEKSNGTIIHVKGGTAEPHFMVPKEKQVTICCQGNYGAVEYQLHFEGSLFAVDRPKPPERINKVQFYIPDMNSRMAGQYSCIYRVGELWSEPSNLLDLVVTEMYDTPTLSVHPGPEVISGEKVTFYCRLDTATSMFLLLKEGRSSHVQRGYGKVQAEFPLGPVTTAHRGTYRCFGSYNNHAWSFPSEPVKLLVTGDIENTSLAPEDPTFPADTWGTYLLTTETGLQKDHALWDHTAQNLLRMGLAFLVLVALVWFLVEDWLSRKRTRERASRASTWEGRRRLNTQTLRAKRSGSGVKQTLNFDLLKLAGDVESNPGPSRGHMTEYKPTVRLATRDDVPRAVRTLAAAFADYPATRHTVDPDRHIERVTELQELFLTRVGLDIGKVWVADDGAAVAVWTTPESVEAGAVFAEIGPRMAELSGSRLAAQQQMEGLLAPHRPKEPAWFLATVGVSPDHQGKGLGSAVVLPGVEAAERAGVPAFLETSAPRNLPFYERLGFTVTADVEVPEGPRTWCMTRKPGA

SEQ ID NO: 10442 - protein, 707 aa, -Artificial-Sequence
MALPVTALLLPLALLLHAARPDIQMTQSPSSLSASVGDRVTITCKASDHINNWLAWYQQKPGQAPKLLIYGATTLETGVPSRFSGSGSGTDYTLTISSLQPEDFATYYCQQSWNTPWTFGQGTKLEIKRGGGGSGGGGSGGGGSQVQLQQPGAELVKPGASVKMSCKASGYAFSSYWINWMKQKPGQGLEWIGQIYPGDGDTNYNGKFKGRATLTADTSSSTAYMQLSSLTSEDSAVYFCARSITTVVGCAMDYWGQGTSVTVSSTRKIEVMYPPPYLDNEKSNGTIIHVKGGTSQPPEIRTLEGSSAFLPCSFNASQGRLAIGSVTWFRDEVVPGKEVRNGTPEFRGRLAPLASSRFLHDHQAELHIRDVRGHDASIYVCRVEVLGLGVGTGNGTRLVVEKEHPQLGAGTVLLLRAGFYAVSFLSVAVGSTVYYQGKCLTWKGPRRQLPAVVPAPLPPPCGSSAHLLPPVPGGRAKRSGSGVKQTLNFDLLKLAGDVESNPGPSRGHMTEYKPTVRLATRDDVPRAVRTLAAAFADYPATRHTVDPDRHIERVTELQELFLTRVGLDIGKVWVADDGAAVAVWTTPESVEAGAVFAEIGPRMAELSGSRLAAQQQMEGLLAPHRPKEPAWFLATVGVSPDHQGKGLGSAVVLPGVEAAERAGVPAFLETSAPRNLPFYERLGFTVTADVEVPEGPRTWCMTRKPGA

SEQ ID NO: 10443 - protein, 779 aa, -Artificial-Sequence
MALPVTALLLPLALLLHAARPDIQMTQSPSSLSASVGDRVTITCKASDHINNWLAWYQQKPGQAPKLLIYGATTLETGVPSRFSGSGSGTDYTLTISSLQPEDFATYYCQQSWNTPWTFGQGTKLEIKRGGGGSGGGGSGGGGSQVQLQQPGAELVKPGASVKMSCKASGYAFSSYWINWMKQKPGQGLEWIGQIYPGDGDTNYNGKFKGRATLTADTSSSTAYMQLSSLTSEDSAVYFCARSITTVVGCAMDYWGQGTSVTVSSTRKIEVMYPPPYLDNEKSNGTIIHVKGGTAQVLQSVAGQTLTVRCQYPPTGSLYEKKGWCKEASALVCIRLVTSSKPRTMAWTSRFTIWDDPDAGFFTVTMTDLREEDSGHYWCRIYRPSDNSVSKSVRFYLVVSPASASTQTSWTPRDLVSSQTQTQSCVPPTAGARQAPESPSTIPVPSQPQNSTLRPGPAAPIALVPVFCGLLVAKSLVLSALLVWWGDIWWKTMMELRSLDTQKATCHLQQVTDLPWTSVSSPVEREILYHTVARTKISDDDDEHTLRAKRSGSGVKQTLNFDLLKLAGDVESNPGPSRGHMTEYKPTVRLATRDDVPRAVRTLAAAFADYPATRHTVDPDRHIERVTELQELFLTRVGLDIGKVWVADDGAAVAVWTTPESVEAGAVFAEIGPRMAELSGSRLAAQQQMEGLLAPHRPKEPAWFLATVGVSPDHQGKGLGSAVVLPGVEAAERAGVPAFLETSAPRNLPFYERLGFTVTADVEVPEGPRTWCMTRKPGA

SEQ ID NO: 10444 - protein, 882 aa, -Artificial-Sequence
MALPVTALLLPLALLLHAARPACEVQLLESGGGLIQPGGSLRLSCAASGFTFSSHAMTWVRQAPGKGLEWVSAISGSGDYTHYADSVKGRFTISRDNSKNTVYLQMNSLRAEDSAVYYCAKDEDGGSLLGHRGQGTLVTVSSGTGGGGSGGGGSGGGGSEFDIVMTQSPATLSLSPGERATLSCRSSKSLQNVNGNTYLYWFQQKPGQSPQLLIYRMSNLNSGVPDRFSGSGSGTEFTLTISSLEPEDFAVYYCMQHLEYPITFGAGTKLEIKGGGGSGGGGSGGGGSEVQLVESGGGLVKPGGSLKLSCAASGYTFTSYVMHWVRQAPGKGLEWIGYINPYNDGTKYNEKFQGRVTISSDKSISTAYMELSSLRSEDTAMYYCARGTYYYGTRVFDYWGQGTLVTVSSTRGMRTEDLPKAVVFLEPQWYRVLEKDSVTLKCQGAYSPEDNSTQWFHNESLISSQASSYFIDAATVDDSGEYRCQTNLSTLSDPVQLEVHIGWLLLQAPRWVFKEEDPIHLRCHSWKNTALHKVTYLQNGKGRKYFHHNSDFYIPKATLKDSGSYFCRGLVGSKNVSSETVNITITQGLAVPTISSFFPPGYQVSFCLVMVLLFAVDTGLYFSVKTNIRSSTRDWKDHKFKWRKDPQDKRAKRSGSGVKQTLNFDLLKLAGDVESNPGPSRGHMTEYKPTVRLATRDDVPRAVRTLAAAFADYPATRHTVDPDRHIERVTELQELFLTRVGLDIGKVWVADDGAAVAVWTTPESVEAGAVFAEIGPRMAELSGSRLAAQQQMEGLLAPHRPKEPAWFLATVGVSPDHQGKGLGSAVVLPGVEAAERAGVPAFLETSAPRNLPFYERLGFTVTADVEVPEGPRTWCMTRKPGA

SEQ ID NO: 10445 - protein, 545 aa, -Artificial-Sequence
MDWIWRILFLVGAATGAHSFEYAKEMRNAYWEIALLPNLTNQQKRAPIRKLYDDPSQSSELLSEAKKLNDSQTRGMRTEDLPKAVVFLEPQWYRVLEKDSVTLKCQGAYSPEDNSTQWFHNESLISSQASSYFIDAATVDDSGEYRCQTNLSTLSDPVQLEVHIGWLLLQAPRWVFKEEDPIHLRCHSWKNTALHKVTYLQNGKGRKYFHHNSDFYIPKATLKDSGSYFCRGLVGSKNVSSETVNITITQGLAVPTISSFFPPGYQVSFCLVMVLLFAVDTGLYFSVKTNIRSSTRDWKDHKFKWRKDPQDKRAKRSGSGVKQTLNFDLLKLAGDVESNPGPSRGHMTEYKPTVRLATRDDVPRAVRTLAAAFADYPATRHTVDPDRHIERVTELQELFLTRVGLDIGKVWVADDGAAVAVWTTPESVEAGAVFAEIGPRMAELSGSRLAAQQQMEGLLAPHRPKEPAWFLATVGVSPDHQGKGLGSAVVLPGVEAAERAGVPAFLETSAPRNLPFYERLGFTVTADVEVPEGPRTWCMTRKPGA

SEQ ID NO: 10446 - protein, 1171 aa, -Artificial-Sequence
MALPVTALLLPLALLLHAARPACEVQLLESGGGLIQPGGSLRLSCAASGFTFSSHAMTWVRQAPGKGLEWVSAISGSGDYTHYADSVKGRFTISRDNSKNTVYLQMNSLRAEDSAVYYCAKDEDGGSLLGHRGQGTLVTVSSGTGGGGSGGGGSGGGGSEFGMRTEDLPKAVVFLEPQWYRVLEKDSVTLKCQGAYSPEDNSTQWFHNESLISSQASSYFIDAATVDDSGEYRCQTNLSTLSDPVQLEVHIGWLLLQAPRWVFKEEDPIHLRCHSWKNTALHKVTYLQNGKGRKYFHHNSDFYIPKATLKDSGSYFCRGLVGSKNVSSETVNITITQGLAVSTISSFFPPGYQVSFCLVMVLLFAVDTGLYFSVKTNIRSSTRDWKDHKFKWRKDPQDKRAKRSGSGATNFSLLKQAGDVEENPGPTSATMDWIWRILFLVGAATGAHSGPEVQLVESGGGLVQAGGSLRLSCAASGRTFSMGWFRQAPGKEREFVAAITYSGGSPYYADSVKGRFTISRDNAKNTVYLQMNSLKPEDTAVYYCAANPTYGSDWNAENWGQGTQVTVSSGSGGGGSGGGGSGGGGSFEGSTRKGCQGSADHVVSISGVPLQLQPNSIQTKVDSIAWKKLLPSQNGFHHILKWENGSLPSNTSNDRFSFIVKNLSLLIKAAQQQDSGLYCLEVTSISGKVQTATFQVFVFDKVEKPRLQGQGKILDRGRCQVALSCLVSRDGNVSYAWYRGSKLIQTAGNLTYLDEEVDINGTHTYTCNVSNPVSWESHTLNLTQDCQNAHQEFRFWPFLVIIVILSALFLGTLACFCVWRRKRKEKQSETSPKEFLTIYEDVKDLKTRRNHEQEQTFPGGGSTIYSMIQSQSSAPTSQEPAYTLYSLIQPSRKSGSRKRNHSPSFNSTIYEVIGKSQPKAQNPARLSRKELENFDVYSRAKRSGSGVKQTLNFDLLKLAGDVESNPGPSRGHMTEYKPTVRLATRDDVPRAVRTLAAAFADYPATRHTVDPDRHIERVTELQELFLTRVGLDIGKVWVADDGAAVAVWTTPESVEAGAVFAEIGPRMAELSGSRLAAQQQMEGLLAPHRPKEPAWFLATVGVSPDHQGKGLGSAVVLPGVEAAERAGVPAFLETSAPRNLPFYERLGFTVTADVEVPEGPRTWCMTRKPGA

SEQ ID NO: 10447 - protein, 817 aa, -Artificial-Sequence
MALPVTALLLPLALLLHAARPEFNAGVTQTPKFQVLKTGQSMTLQCAQDMNHEYMSWYRQDPGMGLRLIHYSVAIQTTDQGEVPNGYNVSRSTIEDFPLRLLSAAPSQTSVYFCASSYLGNTGELFFGEGSRLTVLEDLKNVFPPEVAVFEPSEAEISHTQKATLVCLATGFYPDHVELSWWVNGKEVHSGVSTDPQPLKEQPALNDSRYCLSSRLRVSATFWQNPRNHFRCQVQFYGLSENDEWTQDRAKPVTQIVSAEAWGRADCGSQSFGLLDPKLCYLLDGILFIYGVILTALFLRVKFSRSADAPAYQQGQNQLYNELNLGRREEYDVLDKRRGRDPEMGGKPQRRKNPQEGLYNELQKDKMAEAYSEIGMKGERRRGKGHDGLYQGLSTATKDTYDALHMQALPPRRAKRSGSGATNFSLLKQAGDVEENPGPTSMDWIWRILFLVGAATGAHSFEQEVTQIPAALSVPEGENLVLNCSFTDSAIYNLQWFRQDPGKGLTSLLLIQSSQREQTSGRLNASLDKSSGRSTLYIAASQPGDSATYLCAVRPTSGGSYIPTFGRGTSLIVHPYTRIQNPDPAVYQLRDSKSSDKSVCLFTDFDSQTNVSQSKDSDVYITDKTVLDMRSMDFKSNSAVAWSNKSDFACANAFNNSIIPEDTFFPSPESSCGTQSFGLLDPKLCYLLDGILFIYGVILTALFLRVKFSRSADAPAYQQGQNQLYNELNLGRREEYDVLDKRRGRDPEMGGKPQRRKNPQEGLYNELQKDKMAEAYSEIGMKGERRRGKGHDGLYQGLSTATKDTYDALHMQALPPR

SEQ ID NO: 10448 - protein, 817 aa, -Artificial-Sequence
MALPVTALLLPLALLLHAARPEFQEVTQIPAALSVPEGENLVLNCSFTDSAIYNLQWFRQDPGKGLTSLLLIQSSQREQTSGRLNASLDKSSGRSTLYIAASQPGDSATYLCAVRPTSGGSYIPTFGRGTSLIVHPYTRDLKNVFPPEVAVFEPSEAEISHTQKATLVCLATGFYPDHVELSWWVNGKEVHSGVSTDPQPLKEQPALNDSRYCLSSRLRVSATFWQNPRNHFRCQVQFYGLSENDEWTQDRAKPVTQIVSAEAWGRADCGSQSFGLLDPKLCYLLDGILFIYGVILTALFLRVKFSRSADAPAYQQGQNQLYNELNLGRREEYDVLDKRRGRDPEMGGKPQRRKNPQEGLYNELQKDKMAEAYSEIGMKGERRRGKGHDGLYQGLSTATKDTYDALHMQALPPRRAKRSGSGATNFSLLKQAGDVEENPGPTSMDWIWRILFLVGAATGAHSFENAGVTQTPKFQVLKTGQSMTLQCAQDMNHEYMSWYRQDPGMGLRLIHYSVAIQTTDQGEVPNGYNVSRSTIEDFPLRLLSAAPSQTSVYFCASSYLGNTGELFFGEGSRLTVLEIQNPDPAVYQLRDSKSSDKSVCLFTDFDSQTNVSQSKDSDVYITDKTVLDMRSMDFKSNSAVAWSNKSDFACANAFNNSIIPEDTFFPSPESSCGTQSFGLLDPKLCYLLDGILFIYGVILTALFLRVKFSRSADAPAYQQGQNQLYNELNLGRREEYDVLDKRRGRDPEMGGKPQRRKNPQEGLYNELQKDKMAEAYSEIGMKGERRRGKGHDGLYQGLSTATKDTYDALHMQALPPR

SEQ ID NO: 10449 - protein, 983 aa, -Artificial-Sequence
MALPVTALLLPLALLLHAARPAIQTTDQGEVPNGYNVSRSTIEDFPLRLLSAAPSQTSVYFCASSYLGNTGELFFGEGSRLTVLEGQPKANPTVTLFPPSSEELQANKATLVCLISDFYPGAVTVAWKADGSPVKAGVETTKPSKQSNNKYAASSYLSLTPEQWKSHRSYSCQVTHEGSTVEKTVAPTECSGSQSFGLLDPKLCYLLDGILFIYGVILTALFLRVKFSRSADAPAYQQGQNQLYNELNLGRREEYDVLDKRRGRDPEMGGKPQRRKNPQEGLYNELQKDKMAEAYSEIGMKGERRRGKGHDGLYQGLSTATKDTYDALHMQALPPRRAKRSGSGATNFSLLKQAGDVEENPGPTSMDWIWRILFLVGAATGAHSFEQEVTQIPAALSVPEGENLVLNCSFTDSAIYNLQWFRQDPGKGLTSLLLIQSSQREQTSGRLNASLDKSSGRSTLYIAASQPGDSATYLCAVRPTSGGSYIPTFGRGTSLIVHPYTRASTKGPSVFPLAPSSKSTSGGTAALGCLVKDYFPEPVTVSWNSGALTSGVHTFPAVLQSSGLYSLSSVVTVPSSSLGTQTYICNVNHKPSNTKVDKRVEPKSCGTQSFGLLDPKLCYLLDGILFIYGVILTALFLRVKFSRSADAPAYQQGQNQLYNELNLGRREEYDVLDKRRGRDPEMGGKPQRRKNPQEGLYNELQKDKMAEAYSEIGMKGERRRGKGHDGLYQGLSTATKDTYDALHMQALPPRRAKRSGSGVKQTLNFDLLKLAGDVESNPGPSRGHMTEYKPTVRLATRDDVPRAVRTLAAAFADYPATRHTVDPDRHIERVTELQELFLTRVGLDIGKVWVADDGAAVAVWTTPESVEAGAVFAEIGPRMAELSGSRLAAQQQMEGLLAPHRPKEPAWFLATVGVSPDHQGKGLGSAVVLPGVEAAERAGVPAFLETSAPRNLPFYERLGFTVTADVEVPEGPRTWCMTRKPGA

SEQ ID NO: 10450 - protein, 1001 aa, -Artificial-Sequence
MALPVTALLLPLALLLHAARPAIQTTDQGEVPNGYNVSRSTIEDFPLRLLSAAPSQTSVYFCASSYLGNTGELFFGEGSRLTVLEGQPKANPTVTLFPPSSEELQANKATLVCLISDFYPGAVTVAWKADGSPVKAGVETTKPSKQSNNKYAASSYLSLTPEQWKSHRSYSCQVTHEGSTVEKTVAPTECSGSQSFGLLDPKLCYLLDGILFIYGVILTALFLRVKFSRSADAPAYQQGQNQLYNELNLGRREEYDVLDKRRGRDPEMGGKPQRRKNPQEGLYNELQKDKMAEAYSEIGMKGERRRGKGHDGLYQGLSTATKDTYDALHMQALPPRRAKRSGSGATNFSLLKQAGDVEENPGPTSMDWIWRILFLVGAATGAHSFEQEVTQIPAALSVPEGENLVLNCSFTDSAIYNLQWFRQDPGKGLTSLLLIQSSQREQTSGRLNASLDKSSGRSTLYIAASQPGDSATYLCAVRPTSGGSYIPTFGRGTSLIVHPYTRASPTSPKVFPLSLCSTQPDGNVVIACLVQGFFPQEPLSVTWSESGQGVTARNFPPSQDASGDLYTTSSQLTLPATQCLAGKSVTCHVKHYTNPSQDVTVPCPVPSTPPTPSPSTPPTPSPSGTQSFGLLDPKLCYLLDGILFIYGVILTALFLRVKFSRSADAPAYQQGQNQLYNELNLGRREEYDVLDKRRGRDPEMGGKPQRRKNPQEGLYNELQKDKMAEAYSEIGMKGERRRGKGHDGLYQGLSTATKDTYDALHMQALPPRRAKRSGSGVKQTLNFDLLKLAGDVESNPGPSRGHMTEYKPTVRLATRDDVPRAVRTLAAAFADYPATRHTVDPDRHIERVTELQELFLTRVGLDIGKVWVADDGAAVAVWTTPESVEAGAVFAEIGPRMAELSGSRLAAQQQMEGLLAPHRPKEPAWFLATVGVSPDHQGKGLGSAVVLPGVEAAERAGVPAFLETSAPRNLPFYERLGFTVTADVEVPEGPRTWCMTRKPGA

SEQ ID NO: 10451 - protein, 987 aa, -Artificial-Sequence
ASTMALPVTALLLPLALLLHAARPAIQTTDQGEVPNGYNVSRSTIEDFPLRLLSAAPSQTSVYFCASSYLGNTGELFFGEGSRLTVLEGQPKANPTVTLFPPSSEELQANKATLVCLISDFYPGAVTVAWKADGSPVKAGVETTKPSKQSNNKYAASSYLSLTPEQWKSHRSYSCQVTHEGSTVEKTVAPTECSGSQSFGLLDPKLCYLLDGILFIYGVILTALFLRVKFSRSADAPAYQQGQNQLYNELNLGRREEYDVLDKRRGRDPEMGGKPQRRKNPQEGLYNELQKDKMAEAYSEIGMKGERRRGKGHDGLYQGLSTATKDTYDALHMQALPPRRAKRSGSGATNFSLLKQAGDVEENPGPTSMDWIWRILFLVGAATGAHSFEQEVTQIPAALSVPEGENLVLNCSFTDSAIYNLQWFRQDPGKGLTSLLLIQSSQREQTSGRLNASLDKSSGRSTLYIAASQPGDSATYLCAVRPTSGGSYIPTFGRGTSLIVHPYTRASTKGPSVFPLAPCSRSTSESTAALGCLVKDYFPEPVTVSWNSGALTSGVHTFPAVLQSSGLYSLSSVVTVPSSNFGTQTYTCNVDHKPSNTKVDKTVERKCGTQSFGLLDPKLCYLLDGILFIYGVILTALFLRVKFSRSADAPAYQQGQNQLYNELNLGRREEYDVLDKRRGRDPEMGGKPQRRKNPQEGLYNELQKDKMAEAYSEIGMKGERRRGKGHDGLYQGLSTATKDTYDALHMQALPPRRAKRSGSGVKQTLNFDLLKLAGDVESNPGPSRGHMTEYKPTVRLATRDDVPRAVRTLAAAFADYPATRHTVDPDRHIERVTELQELFLTRVGLDIGKVWVADDGAAVAVWTTPESVEAGAVFAEIGPRMAELSGSRLAAQQQMEGLLAPHRPKEPAWFLATVGVSPDHQGKGLGSAVVLPGVEAAERAGVPAFLETSAPRNLPFYERLGFTVTADVEVPEGPRTWCMTRKPGAVD

SEQ ID NO: 10452 - protein, 1089 aa, -Artificial-Sequence
MALPVTALLLPLALLLHAARPNAGVTQTPKFQVLKTGQSMTLQCAQDMNHEYMSWYRQDPGMGLRLIHYSVAIQTTDQGEVPNGYNVSRSTIEDFPLRLLSAAPSQTSVYFCASSYLGNTGELFFGEGSRLTVLEGQPKANPTVTLFPPSSEELQANKATLVCLISDFYPGAVTVAWKADGSPVKAGVETTKPSKQSNNKYAASSYLSLTPEQWKSHRSYSCQVTHEGSTVEKTVAPTECSGSQSFGLLDPKLCYLLDGILFIYGVILTALFLRVKFSRSADAPAYQQGQNQLYNELNLGRREEYDVLDKRRGRDPEMGGKPQRRKNPQEGLYNELQKDKMAEAYSEIGMKGERRRGKGHDGLYQGLSTATKDTYDALHMQALPPRRAKRSGSGATNFSLLKQAGDVEENPGPTSMDWIWRILFLVGAATGAHSFEQEVTQIPAALSVPEGENLVLNCSFTDSAIYNLQWFRQDPGKGLTSLLLIQSSQREQTSGRLNASLDKSSGRSTLYIAASQPGDSATYLCAVRPTSGGSYIPTFGRGTSLIVHPYTRAPTKAPDVFPIISGCRHPKDNSPVVLACLITGYHPTSVTVTWYMGTQSQPQRTFPEIQRRDSYYMTSSQLSTPLQQWRQGEYKCVVQHTASKSKKEIFRWPESPKAQASSVPTAQPQAEGSLAKATTAPATTRNTGRGGEEKKKEKEKEEQEERETKTPGTQSFGLLDPKLCYLLDGILFIYGVILTALFLRVKFSRSADAPAYQQGQNQLYNELNLGRREEYDVLDKRRGRDPEMGGKPQRRKNPQEGLYNELQKDKMAEAYSEIGMKGERRRGKGHDGLYQGLSTATKDTYDALHMQALPPRRAKRSGSGVKQTLNFDLLKLAGDVESNPGPSRGHMTEYKPTVRLATRDDVPRAVRTLAAAFADYPATRHTVDPDRHIERVTELQELFLTRVGLDIGKVWVADDGAAVAVWTTPESVEAGAVFAEIGPRMAELSGSRLAAQQQMEGLLAPHRPKEPAWFLATVGVSPDHQGKGLGSAVVLPGVEAAERAGVPAFLETSAPRNLPFYERLGFTVTADVEVPEGPRTWCMTRKPGA

SEQ ID NO: 10453 - protein, 1031 aa, -Artificial-Sequence
MALPVTALLLPLALLLHAARPNAGVTQTPKFQVLKTGQSMTLQCAQDMNHEYMSWYRQDPGMGLRLIHYSVAIQTTDQGEVPNGYNVSRSTIEDFPLRLLSAAPSQTSVYFCASSYLGNTGELFFGEGSRLTVLEGQPKANPTVTLFPPSSEELQANKATLVCLISDFYPGAVTVAWKADGSPVKAGVETTKPSKQSNNKYAASSYLSLTPEQWKSHRSYSCQVTHEGSTVEKTVAPTECSGSQSFGLLDPKLCYLLDGILFIYGVILTALFLRVKFSRSADAPAYQQGQNQLYNELNLGRREEYDVLDKRRGRDPEMGGKPQRRKNPQEGLYNELQKDKMAEAYSEIGMKGERRRGKGHDGLYQGLSTATKDTYDALHMQALPPRRAKRSGSGATNFSLLKQAGDVEENPGPTSMDWIWRILFLVGAATGAHSFEQEVTQIPAALSVPEGENLVLNCSFTDSAIYNLQWFRQDPGKGLTSLLLIQSSQREQTSGRLNASLDKSSGRSTLYIAASQPGDSATYLCAVRPTSGGSYIPTFGRGTSLIVHPYTRASTKGPSVFPLAPCSRSTSESTAALGCLVKDYFPEPVTVSWNSGALTSGVHTFPAVLQSSGLYSLSSVVTVPSSNFGTQTYTCNVDHKPSNTKVDKTVERKGTQSFGLLDPKLCYLLDGILFIYGVILTALFLRVKFSRSADAPAYQQGQNQLYNELNLGRREEYDVLDKRRGRDPEMGGKPQRRKNPQEGLYNELQKDKMAEAYSEIGMKGERRRGKGHDGLYQGLSTATKDTYDALHMQALPPRRAKRSGSGVKQTLNFDLLKLAGDVESNPGPSRGHMTEYKPTVRLATRDDVPRAVRTLAAAFADYPATRHTVDPDRHIERVTELQELFLTRVGLDIGKVWVADDGAAVAVWTTPESVEAGAVFAEIGPRMAELSGSRLAAQQQMEGLLAPHRPKEPAWFLATVGVSPDHQGKGLGSAVVLPGVEAAERAGVPAFLETSAPRNLPFYERLGFTVTADVEVPEGPRTWCMTRKPGA

SEQ ID NO: 10454 - protein, 1040 aa, -Artificial-Sequence
MALPVTALLLPLALLLHAARPNAGVTQTPKFQVLKTGQSMTLQCAQDMNHEYMSWYRQDPGMGLRLIHYSVAIQTTDQGEVPNGYNVSRSTIEDFPLRLLSAAPSQTSVYFCASSYLGNTGELFFGEGSRLTVLEGQPKANPTVTLFPPSSEELQANKATLVCLISDFYPGAVTVAWKADGSPVKAGVETTKPSKQSNNKYAASSYLSLTPEQWKSHRSYSCQVTHEGSTVEKTVAPTECSGSQSFGLLDPKLCYLLDGILFIYGVILTALFLRVKFSRSADAPAYQQGQNQLYNELNLGRREEYDVLDKRRGRDPEMGGKPQRRKNPQEGLYNELQKDKMAEAYSEIGMKGERRRGKGHDGLYQGLSTATKDTYDALHMQALPPRRAKRSGSGATNFSLLKQAGDVEENPGPTSMDWIWRILFLVGAATGAHSFEQEVTQIPAALSVPEGENLVLNCSFTDSAIYNLQWFRQDPGKGLTSLLLIQSSQREQTSGRLNASLDKSSGRSTLYIAASQPGDSATYLCAVRPTSGGSYIPTFGRGTSLIVHPYTRASPTSPKVFPLSLDSTPQDGNVVVACLVQGFFPQEPLSVTWSESGQNVTARNFPPSQDASGDLYTTSSQLTLPATQCPDGKSVTCHVKHYTNPSQDVTVPCPVPPPPPGTQSFGLLDPKLCYLLDGILFIYGVILTALFLRVKFSRSADAPAYQQGQNQLYNELNLGRREEYDVLDKRRGRDPEMGGKPQRRKNPQEGLYNELQKDKMAEAYSEIGMKGERRRGKGHDGLYQGLSTATKDTYDALHMQALPPRRAKRSGSGVKQTLNFDLLKLAGDVESNPGPSRGHMTEYKPTVRLATRDDVPRAVRTLAAAFADYPATRHTVDPDRHIERVTELQELFLTRVGLDIGKVWVADDGAAVAVWTTPESVEAGAVFAEIGPRMAELSGSRLAAQQQMEGLLAPHRPKEPAWFLATVGVSPDHQGKGLGSAVVLPGVEAAERAGVPAFLETSAPRNLPFYERLGFTVTADVEVPEGPRTWCMTRKPGAVD

SEQ ID NO: 10455 - protein, 1033 aa, -Artificial-Sequence
MALPVTALLLPLALLLHAARPNAGVTQTPKFQVLKTGQSMTLQCAQDMNHEYMSWYRQDPGMGLRLIHYSVAIQTTDQGEVPNGYNVSRSTIEDFPLRLLSAAPSQTSVYFCASSYLGNTGELFFGEGSRLTVLEGQPKANPTVTLFPPSSEELQANKATLVCLISDFYPGAVTVAWKADGSPVKAGVETTKPSKQSNNKYAASSYLSLTPEQWKSHRSYSCQVTHEGSTVEKTVAPTECSGSQSFGLLDPKLCYLLDGILFIYGVILTALFLRVKFSRSADAPAYQQGQNQLYNELNLGRREEYDVLDKRRGRDPEMGGKPQRRKNPQEGLYNELQKDKMAEAYSEIGMKGERRRGKGHDGLYQGLSTATKDTYDALHMQALPPRRAKRSGSGATNFSLLKQAGDVEENPGPTSMDWIWRILFLVGAATGAHSFEQEVTQIPAALSVPEGENLVLNCSFTDSAIYNLQWFRQDPGKGLTSLLLIQSSQREQTSGRLNASLDKSSGRSTLYIAASQPGDSATYLCAVRPTSGGSYIPTFGRGTSLIVHPYTRASTQSPSVFPLTRCCKNIPSNATSVTLGCLATGYFPEPVMVTWDTGSLNGTTMTLPATTLTLSGHYATISLLTVSGAWAKQMFTCRVAHTPSSTDWVDNKTFSGTQSFGLLDPKLCYLLDGILFIYGVILTALFLRVKFSRSADAPAYQQGQNQLYNELNLGRREEYDVLDKRRGRDPEMGGKPQRRKNPQEGLYNELQKDKMAEAYSEIGMKGERRRGKGHDGLYQGLSTATKDTYDALHMQALPPRRAKRSGSGVKQTLNFDLLKLAGDVESNPGPSRGHMTEYKPTVRLATRDDVPRAVRTLAAAFADYPATRHTVDPDRHIERVTELQELFLTRVGLDIGKVWVADDGAAVAVWTTPESVEAGAVFAEIGPRMAELSGSRLAAQQQMEGLLAPHRPKEPAWFLATVGVSPDHQGKGLGSAVVLPGVEAAERAGVPAFLETSAPRNLPFYERLGFTVTADVEVPEGPRTWCMTRKPGA

SEQ ID NO: 10456 - protein, 1033 aa, -Artificial-Sequence
MALPVTALLLPLALLLHAARPNAGVTQTPKFQVLKTGQSMTLQCAQDMNHEYMSWYRQDPGMGLRLIHYSVAIQTTDQGEVPNGYNVSRSTIEDFPLRLLSAAPSQTSVYFCASSYLGNTGELFFGEGSRLTVLEGQPKANPTVTLFPPSSEELQANKATLVCLISDFYPGAVTVAWKADGSPVKAGVETTKPSKQSNNKYAASSYLSLTPEQWKSHRSYSCQVTHEGSTVEKTVAPTECSGSQSFGLLDPKLCYLLDGILFIYGVILTALFLRVKFSRSADAPAYQQGQNQLYNELNLGRREEYDVLDKRRGRDPEMGGKPQRRKNPQEGLYNELQKDKMAEAYSEIGMKGERRRGKGHDGLYQGLSTATKDTYDALHMQALPPRRAKRSGSGATNFSLLKQAGDVEENPGPTSMDWIWRILFLVGAATGAHSFEQEVTQIPAALSVPEGENLVLNCSFTDSAIYNLQWFRQDPGKGLTSLLLIQSSQREQTSGRLNASLDKSSGRSTLYIAASQPGDSATYLCAVRPTSGGSYIPTFGRGTSLIVHPYTRASTKGPSVFPLAPCSRSTSESTAALGCLVKDYFPEPVTVSWNSGALTSGVHTFPAVLQSSGLYSLSSVVTVPSSSLGTKTYTCNVDHKPSNTKVDKRVESKYGGTQSFGLLDPKLCYLLDGILFIYGVILTALFLRVKFSRSADAPAYQQGQNQLYNELNLGRREEYDVLDKRRGRDPEMGGKPQRRKNPQEGLYNELQKDKMAEAYSEIGMKGERRRGKGHDGLYQGLSTATKDTYDALHMQALPPRRAKRSGSGVKQTLNFDLLKLAGDVESNPGPSRGHMTEYKPTVRLATRDDVPRAVRTLAAAFADYPATRHTVDPDRHIERVTELQELFLTRVGLDIGKVWVADDGAAVAVWTTPESVEAGAVFAEIGPRMAELSGSRLAAQQQMEGLLAPHRPKEPAWFLATVGVSPDHQGKGLGSAVVLPGVEAAERAGVPAFLETSAPRNLPFYERLGFTVTADVEVPEGPRTWCMTRKPGA

SEQ ID NO: 10457 - protein, 1033 aa, -Artificial-Sequence
MALPVTALLLPLALLLHAARPNAGVTQTPKFQVLKTGQSMTLQCAQDMNHEYMSWYRQDPGMGLRLIHYSVAIQTTDQGEVPNGYNVSRSTIEDFPLRLLSAAPSQTSVYFCASSYLGNTGELFFGEGSRLTVLEGQPKANPTVTLFPPSSEELQANKATLVCLISDFYPGAVTVAWKADGSPVKAGVETTKPSKQSNNKYAASSYLSLTPEQWKSHRSYSCQVTHEGSTVEKTVAPTECSGSQSFGLLDPKLCYLLDGILFIYGVILTALFLRVKFSRSADAPAYQQGQNQLYNELNLGRREEYDVLDKRRGRDPEMGGKPQRRKNPQEGLYNELQKDKMAEAYSEIGMKGERRRGKGHDGLYQGLSTATKDTYDALHMQALPPRRAKRSGSGATNFSLLKQAGDVEENPGPTSMDWIWRILFLVGAATGAHSFEQEVTQIPAALSVPEGENLVLNCSFTDSAIYNLQWFRQDPGKGLTSLLLIQSSQREQTSGRLNASLDKSSGRSTLYIAASQPGDSATYLCAVRPTSGGSYIPTFGRGTSLIVHPYTRASTKGPSVFPLAPCSRSTSESTAALGCLVKDYFPEPVTVSWNSGALTSGVHTFPAVLQSSGLYSLSSVVTVPSSNFGTQTYTCNVDHKPSNTKVDKTVERKCCGTQSFGLLDPKLCYLLDGILFIYGVILTALFLRVKFSRSADAPAYQQGQNQLYNELNLGRREEYDVLDKRRGRDPEMGGKPQRRKNPQEGLYNELQKDKMAEAYSEIGMKGERRRGKGHDGLYQGLSTATKDTYDALHMQALPPRRAKRSGSGVKQTLNFDLLKLAGDVESNPGPSRGHMTEYKPTVRLATRDDVPRAVRTLAAAFADYPATRHTVDPDRHIERVTELQELFLTRVGLDIGKVWVADDGAAVAVWTTPESVEAGAVFAEIGPRMAELSGSRLAAQQQMEGLLAPHRPKEPAWFLATVGVSPDHQGKGLGSAVVLPGVEAAERAGVPAFLETSAPRNLPFYERLGFTVTADVEVPEGPRTWCMTRKPGA

SEQ ID NO: 10458 - protein, 1048 aa, -Artificial-Sequence
MALPVTALLLPLALLLHAARPNAGVTQTPKFQVLKTGQSMTLQCAQDMNHEYMSWYRQDPGMGLRLIHYSVAIQTTDQGEVPNGYNVSRSTIEDFPLRLLSAAPSQTSVYFCASSYLGNTGELFFGEGSRLTVLEDLKNVFPPEVAVFEPSEAEISHTQKATLVCLATGFYPDHVELSWWVNGKEVHSGVSTDPQPLKEQPALNDSRYCLSSRLRVSATFWQNPRNHFRCQVQFYGLSENDEWTQDRAKPVTQIVSAEAWGRADCGSQSFGLLDPKLCYLLDGILFIYGVILTALFLRVKFSRSADAPAYQQGQNQLYNELNLGRREEYDVLDKRRGRDPEMGGKPQRRKNPQEGLYNELQKDKMAEAYSEIGMKGERRRGKGHDGLYQGLSTATKDTYDALHMQALPPRRAKRSGSGATNFSLLKQAGDVEENPGPTSMDWIWRILFLVGAATGAHSFEQEVTQIPAALSVPEGENLVLNCSFTDSAIYNLQWFRQDPGKGLTSLLLIQSSQREQTSGRLNASLDKSSGRSTLYIAASQPGDSATYLCAVRPTSGGSYIPTFGRGTSLIVHPYTRIQNPDPAVYQLRDSKSSDKSVCLFTDFDSQTNVSQSKDSDVYITDKTVLDMRSMDFKSNSAVAWSNKSDFACANAFNNSIIPEDTFFPSPESSCGTQSFGLLDPKLCYLLDGILFIYGVILTALFLRVKFSRSADAPAYQQGQNQLYNELNLGRREEYDVLDKRRGRDPEMGGKPQRRKNPQEGLYNELQKDKMAEAYSEIGMKGERRRGKGHDGLYQGLSTATKDTYDALHMQALPPRRAKRSGSGVKQTLNFDLLKLAGDVESNPGPSRGHMTEYKPTVRLATRDDVPRAVRTLAAAFADYPATRHTVDPDRHIERVTELQELFLTRVGLDIGKVWVADDGAAVAVWTTPESVEAGAVFAEIGPRMAELSGSRLAAQQQMEGLLAPHRPKEPAWFLATVGVSPDHQGKGLGSAVVLPGVEAAERAGVPAFLETSAPRNLPFYERLGFTVTADVEVPEGPRTWCMTRKPGA

SEQ ID NO: 10459 - protein, 1048 aa, -Artificial-Sequence
MALPVTALLLPLALLLHAARPNAGVTQTPKFQVLKTGQSMTLQCAQDMNHEYMSWYRQDPGMGLRLIHYSVAIQTTDQGEVPNGYNVSRSTIEDFPLRLLSAAPSQTSVYFCASSYLGNTGELFFGEGSRLTVLEDLKNVFPPEVAVFEPSKAEIAHTQKATLVCLATGFYPDHVELSWWVNGKEVHSGVCTDPQPLKEQPALNDSRYCLSSRLRVSATFWQNPRNHFRCQVQFYGLSENDEWTQDRAKPVTQIVSAEAWGRADCGSQSFGLLDPKLCYLLDGILFIYGVILTALFLRVKFSRSADAPAYQQGQNQLYNELNLGRREEYDVLDKRRGRDPEMGGKPQRRKNPQEGLYNELQKDKMAEAYSEIGMKGERRRGKGHDGLYQGLSTATKDTYDALHMQALPPRRAKRSGSGATNFSLLKQAGDVEENPGPTSMDWIWRILFLVGAATGAHSFEQEVTQIPAALSVPEGENLVLNCSFTDSAIYNLQWFRQDPGKGLTSLLLIQSSQREQTSGRLNASLDKSSGRSTLYIAASQPGDSATYLCAVRPTSGGSYIPTFGRGTSLIVHPYTRIQNPDPAVYQLRDSKSSDKSVCLFTDFDSQTNVSQSKDSDVYITDKCVLDMRSMDFKSNSAVAWSNKSDFACANAFNNSIIPEDTFFPSSDVPCGTQSFGLLDPKLCYLLDGILFIYGVILTALFLRVKFSRSADAPAYQQGQNQLYNELNLGRREEYDVLDKRRGRDPEMGGKPQRRKNPQEGLYNELQKDKMAEAYSEIGMKGERRRGKGHDGLYQGLSTATKDTYDALHMQALPPRRAKRSGSGVKQTLNFDLLKLAGDVESNPGPSRGHMTEYKPTVRLATRDDVPRAVRTLAAAFADYPATRHTVDPDRHIERVTELQELFLTRVGLDIGKVWVADDGAAVAVWTTPESVEAGAVFAEIGPRMAELSGSRLAAQQQMEGLLAPHRPKEPAWFLATVGVSPDHQGKGLGSAVVLPGVEAAERAGVPAFLETSAPRNLPFYERLGFTVTADVEVPEGPRTWCMTRKPGA

SEQ ID NO: 10460 - protein, 815 aa, -Artificial-Sequence
MALPVTALLLPLALLLHAARPNAGVTQTPKFQVLKTGQSMTLQCAQDMNHEYMSWYRQDPGMGLRLIHYSVAIQTTDQGEVPNGYNVSRSTIEDFPLRLLSAAPSQTSVYFCASSYLGNTGELFFGEGSRLTVLEDLKNVFPPEVAVFEPSEAEISHTQKATLVCLATGFYPDHVELSWWVNGKEVHSGVCTDPQPLKEQPALNDSRYCLSSRLRVSATFWQNPRNHFRCQVQFYGLSENDEWTQDRAKPVTQIVSAEAWGRADCGSQSFGLLDPKLCYLLDGILFIYGVILTALFLRVKFSRSADAPAYQQGQNQLYNELNLGRREEYDVLDKRRGRDPEMGGKPQRRKNPQEGLYNELQKDKMAEAYSEIGMKGERRRGKGHDGLYQGLSTATKDTYDALHMQALPPRRAKRSGSGATNFSLLKQAGDVEENPGPTSMDWIWRILFLVGAATGAHSFEQEVTQIPAALSVPEGENLVLNCSFTDSAIYNLQWFRQDPGKGLTSLLLIQSSQREQTSGRLNASLDKSSGRSTLYIAASQPGDSATYLCAVRPTSGGSYIPTFGRGTSLIVHPYTRIQNPDPAVYQLRDSKSSDKSVCLFTDFDSQTNVSQSKDSDVYITDKCVLDMRSMDFKSNSAVAWSNKSDFACANAFNNSIIPEDTFFPSPESSCGTQSFGLLDPKLCYLLDGILFIYGVILTALFLRVKFSRSADAPAYQQGQNQLYNELNLGRREEYDVLDKRRGRDPEMGGKPQRRKNPQEGLYNELQKDKMAEAYSEIGMKGERRRGKGHDGLYQGLSTATKDTYDALHMQALPPR

SEQ ID NO: 10461 - protein, 820 aa, -Artificial-Sequence
MALPVTALLLPLALLLHAARPNAGVTQTPKFQVLKTGQSMTLQCAQDMNHEYMSWYRQDPGMGLRLIHYSVAIQTTDQGEVPNGYNVSRSTIEDFPLRLLSAAPSQTSVYFCASSYLGNTGELFFGEGSRLTVLEQSFGLLDPKLCYLLDGILFIYGVILTALFLRVKFSRSADAPAYQQGQNQLYNELNLGRREEYDVLDKRRGRDPEMGGKPQRRKNPQEGLYNELQKDKMAEAYSEIGMKGERRRGKGHDGLYQGLSTATKDTYDALHMQALPPRRAKRSGSGATNFSLLKQAGDVEENPGPTSMDWIWRILFLVGAATGAHSFEQEVTQIPAALSVPEGENLVLNCSFTDSAIYNLQWFRQDPGKGLTSLLLIQSSQREQTSGRLNASLDKSSGRSTLYIAASQPGDSATYLCAVRPTSGGSYIPTFGRGTSLIVHPYTRQSFGLLDPKLCYLLDGILFIYGVILTALFLRVKFSRSADAPAYQQGQNQLYNELNLGRREEYDVLDKRRGRDPEMGGKPQRRKNPQEGLYNELQKDKMAEAYSEIGMKGERRRGKGHDGLYQGLSTATKDTYDALHMQALPPRRAKRSGSGVKQTLNFDLLKLAGDVESNPGPSRGHMTEYKPTVRLATRDDVPRAVRTLAAAFADYPATRHTVDPDRHIERVTELQELFLTRVGLDIGKVWVADDGAAVAVWTTPESVEAGAVFAEIGPRMAELSGSRLAAQQQMEGLLAPHRPKEPAWFLATVGVSPDHQGKGLGSAVVLPGVEAAERAGVPAFLETSAPRNLPFYERLGFTVTADVEVPEGPRTWCMTRKPGA

SEQ ID NO: 10462 - protein, 856 aa, -Artificial-Sequence
MALPVTALLLPLALLLHAARPNAGVTQTPKFQVLKTGQSMTLQCAQDMNHEYMSWYRQDPGMGLRLIHYSVAIQTTDQGEVPNGYNVSRSTIEDFPLRLLSAAPSQTSVYFCASSYLGNTGELFFGEGSRLTVLEDLKNVFPPEVAVFEPSEAEISHTQKATLVCLATGFYPDHVELSWWVNGKEVHSGVCTDPQPLKEQPALNDSRYCLSSRLRVSATFWQNPRNHFRCQVQFYGLSENDEWTQDRAKPVTQIVSAEAWGRADCGSQSFGLLDPKLCYLLDGILFIYGVILTALFLRSKRSRLLHSDYMNMTPRRPGPTRKHYQPYAPPRDFAAYRSRVKFSRSADAPAYQQGQNQLYNELNLGRREEYDVLDKRRGRDPEMGGKPQRRKNPQEGLYNELQKDKMAEAYSEIGMKGERRRGKGHDGLYQGLSTATKDTYDALHMQALPPRRAKRSGSGATNFSLLKQAGDVEENPGPTSMDWIWRILFLVGAATGAHSFEQEVTQIPAALSVPEGENLVLNCSFTDSAIYNLQWFRQDPGKGLTSLLLIQSSQREQTSGRLNASLDKSSGRSTLYIAASQPGDSATYLCAVRPTSGGSYIPTFGRGTSLIVHPYTRIQNPDPAVYQLRDSKSSDKSVCLFTDFDSQTNVSQSKDSDVYITDKCVLDMRSMDFKSNSAVAWSNKSDFACANAFNNSIIPEDTFFPSPESSCGTQSFGLLDPKLCYLLDGILFIYGVILTALFLRVKFSRSADAPAYQQGQNQLYNELNLGRREEYDVLDKRRGRDPEMGGKPQRRKNPQEGLYNELQKDKMAEAYSEIGMKGERRRGKGHDGLYQGLSTATKDTYDALHMQALPPR

SEQ ID NO: 10463 - protein, 897 aa, -Artificial-Sequence
MALPVTALLLPLALLLHAARPNAGVTQTPKFQVLKTGQSMTLQCAQDMNHEYMSWYRQDPGMGLRLIHYSVAIQTTDQGEVPNGYNVSRSTIEDFPLRLLSAAPSQTSVYFCASSYLGNTGELFFGEGSRLTVLEDLKNVFPPEVAVFEPSEAEISHTQKATLVCLATGFYPDHVELSWWVNGKEVHSGVCTDPQPLKEQPALNDSRYCLSSRLRVSATFWQNPRNHFRCQVQFYGLSENDEWTQDRAKPVTQIVSAEAWGRADCGSQSFGLLDPKLCYLLDGILFIYGVILTALFLRSKRSRLLHSDYMNMTPRRPGPTRKHYQPYAPPRDFAAYRSRVKFSRSADAPAYQQGQNQLYNELNLGRREEYDVLDKRRGRDPEMGGKPQRRKNPQEGLYNELQKDKMAEAYSEIGMKGERRRGKGHDGLYQGLSTATKDTYDALHMQALPPRRAKRSGSGATNFSLLKQAGDVEENPGPTSMDWIWRILFLVGAATGAHSFEQEVTQIPAALSVPEGENLVLNCSFTDSAIYNLQWFRQDPGKGLTSLLLIQSSQREQTSGRLNASLDKSSGRSTLYIAASQPGDSATYLCAVRPTSGGSYIPTFGRGTSLIVHPYTRIQNPDPAVYQLRDSKSSDKSVCLFTDFDSQTNVSQSKDSDVYITDKCVLDMRSMDFKSNSAVAWSNKSDFACANAFNNSIIPEDTFFPSPESSCGTQSFGLLDPKLCYLLDGILFIYGVILTALFLRSKRSRLLHSDYMNMTPRRPGPTRKHYQPYAPPRDFAAYRSRVKFSRSADAPAYQQGQNQLYNELNLGRREEYDVLDKRRGRDPEMGGKPQRRKNPQEGLYNELQKDKMAEAYSEIGMKGERRRGKGHDGLYQGLSTATKDTYDALHMQALPPR

SEQ ID NO: 10464 - protein, 815 aa, -Artificial-Sequence
MALPVTALLLPLALLLHAARPNAGVTQTPKFQVLKTGQSMTLQCAQDMNHEYMSWYRQDPGMGLRLIHYSVAIQTTDQGEVPNGYNVSRSTIEDFPLRLLSAAPSQTSVYFCASSYLGNTGELFFGEGSRLTVLEDLKNVFPPEVAVFEPSEAEISHTQKATLVCLATGFYPDHVELSWWVNGKEVHSGVSTDPQPLKEQPALNDSRYCLSSRLRVSATFWQNPRNHFRCQVQFYGLSENDEWTQDRAKPVTQIVSAEAWGRADCGSQSFGLLDPKLCYLLDGILFIYGVILTALFLRVKFSRSADAPAYQQGQNQLYNELNLGRREEYDVLDKRRGRDPEMGGKPQRRKNPQEGLYNELQKDKMAEAYSEIGMKGERRRGKGHDGLYQGLSTATKDTYDALHMQALPPRRAKRSGSGATNFSLLKQAGDVEENPGPTSMDWIWRILFLVGAATGAHSFEQEVTQIPAALSVPEGENLVLNCSFTDSAIYNLQWFRQDPGKGLTSLLLIQSSQREQTSGRLNASLDKSSGRSTLYIAASQPGDSATYLCAVRPTSGGSYIPTFGRGTSLIVHPYTRIQNPDPAVYQLRDSKSSDKSVCLFTDFDSQTNVSQSKDSDVYITDKTVLDMRSMDFKSNSAVAWSNKSDFACANAFNNSIIPEDTFFPSPESSCGTQSFGLLDPKLCYLLDGILFIYGVILTALFLRVKFSRSADAPAYQQGQNQLYNELNLGRREEYDVLDKRRGRDPEMGGKPQRRKNPQEGLYNELQKDKMAEAYSEIGMKGERRRGKGHDGLYQGLSTATKDTYDALHMQALPPR

SEQ ID NO: 10465 - protein, 1023 aa, -Artificial-Sequence
MALPVTALLLPLALLLHAARPNAGVTQTPKFQVLKTGQSMTLQCAQDMNHEYMSWYRQDPGMGLRLIHYSVAIQTTDQGEVPNGYNVSRSTIEDFPLRLLSAAPSQTSVYFCASSYLGNTGELFFGEGSRLTVLEDKQLDADVSPKPTIFLPSIAETKLQKAGTYLCLLEKFFPDVIKIHWQEKKSNTILGSQEGNTMKTNDTYMKFSWLTVPEKSLDKEHRCIVRHENNKNGVDQEIIFPPIKTDVITGSQSFGLLDPKLCYLLDGILFIYGVILTALFLRVKFSRSADAPAYQQGQNQLYNELNLGRREEYDVLDKRRGRDPEMGGKPQRRKNPQEGLYNELQKDKMAEAYSEIGMKGERRRGKGHDGLYQGLSTATKDTYDALHMQALPPRRAKRSGSGATNFSLLKQAGDVEENPGPTSMDWIWRILFLVGAATGAHSFEQEVTQIPAALSVPEGENLVLNCSFTDSAIYNLQWFRQDPGKGLTSLLLIQSSQREQTSGRLNASLDKSSGRSTLYIAASQPGDSATYLCAVRPTSGGSYIPTFGRGTSLIVHPYTRSQPHTKPSVFVMKNGTNVACLVKEFYPKDIRINLVSSKKITEFDPAIVISPSGKYNAVKLGKYEDSNSVTCSVQHDNKTVHSTDFGTQSFGLLDPKLCYLLDGILFIYGVILTALFLRVKFSRSADAPAYQQGQNQLYNELNLGRREEYDVLDKRRGRDPEMGGKPQRRKNPQEGLYNELQKDKMAEAYSEIGMKGERRRGKGHDGLYQGLSTATKDTYDALHMQALPPRRAKRSGSGVKQTLNFDLLKLAGDVESNPGPSRGHMTEYKPTVRLATRDDVPRAVRTLAAAFADYPATRHTVDPDRHIERVTELQELFLTRVGLDIGKVWVADDGAAVAVWTTPESVEAGAVFAEIGPRMAELSGSRLAAQQQMEGLLAPHRPKEPAWFLATVGVSPDHQGKGLGSAVVLPGVEAAERAGVPAFLETSAPRNLPFYERLGFTVTADVEVPEGPRTWCMTRKPGA

SEQ ID NO: 10466 - protein, 893 aa, -Artificial-Sequence
MALPVTALLLPLALLLHAARPNAGVTQTPKFQVLKTGQSMTLQCAQDMNHEYMSWYRQDPGMGLRLIHYSVAIQTTDQGEVPNGYNVSRSTIEDFPLRLLSAAPSQTSVYFCASSYLGNTGELFFGEGSRLTVLEGQPKANPTVTLFPPSSEELQANKATLVCLISDFYPGAVTVAWKADGSPVKAGVETTKPSKQSNNKYAASSYLSLTPEQWKSHRSYSCQVTHEGSTVEKTVAPTECSTTPGERSSLPAFYPGTSGSCSGCGSLSLPLLAGLVAADAVASLLIVGAVFLCARPRRSPAQEDGKVYINMPGRGRAKRSGSGATNFSLLKQAGDVEENPGPTSMDWIWRILFLVGAATGAHSFEQEVTQIPAALSVPEGENLVLNCSFTDSAIYNLQWFRQDPGKGLTSLLLIQSSQREQTSGRLNASLDKSSGRSTLYIAASQPGDSATYLCAVRPTSGGSYIPTFGRGTSLIVHPYTRASTKGPSVFPLAPSSKSTSGGTAALGCLVKDYFPEPVTVSWNSGALTSGVHTFPAVLQSSGLYSLSSVVTVPSSSLGTQTYICNVNHKPSNTKVDKRVEPKSCTTPGERSSLPAFYPGTSGSCSGCGSLSLPLLAGLVAADAVASLLIVGAVFLCARPRRSPAQEDGKVYINMPGRGRAKRSGSGVKQTLNFDLLKLAGDVESNPGPSRGHMTEYKPTVRLATRDDVPRAVRTLAAAFADYPATRHTVDPDRHIERVTELQELFLTRVGLDIGKVWVADDGAAVAVWTTPESVEAGAVFAEIGPRMAELSGSRLAAQQQMEGLLAPHRPKEPAWFLATVGVSPDHQGKGLGSAVVLPGVEAAERAGVPAFLETSAPRNLPFYERLGFTVTADVEVPEGPRTWCMTRKPGAVD

SEQ ID NO: 10467 - protein, 720 aa, -Artificial-Sequence
MALPVTALLLPLALLLHAARPNAGVTQTPKFQVLKTGQSMTLQCAQDMNHEYMSWYRQDPGMGLRLIHYSVAIQTTDQGEVPNGYNVSRSTIEDFPLRLLSAAPSQTSVYFCASSYLGNTGELFFGEGSRLTVLEGDIENTSLAPEDPTFPADTWGTYLLTTETGLQKDHALWDHTAQNLLRMGLAFLVLVALVWFLVEDWLSRKRTRERASRASTWEGRRRLNTQTLRAKRSGSGATNFSLLKQAGDVEENPGPTSMDWIWRILFLVGAATGAHSFEQEVTQIPAALSVPEGENLVLNCSFTDSAIYNLQWFRQDPGKGLTSLLLIQSSQREQTSGRLNASLDKSSGRSTLYIAASQPGDSATYLCAVRPTSGGSYIPTFGRGTSLIVHPYTRGDIENTSLAPEDPTFPADTWGTYLLTTETGLQKDHALWDHTAQNLLRMGLAFLVLVALVWFLVEDWLSRKRTRERASRASTWEGRRRLNTQTLRAKRSGSGVKQTLNFDLLKLAGDVESNPGPSRGHMTEYKPTVRLATRDDVPRAVRTLAAAFADYPATRHTVDPDRHIERVTELQELFLTRVGLDIGKVWVADDGAAVAVWTTPESVEAGAVFAEIGPRMAELSGSRLAAQQQMEGLLAPHRPKEPAWFLATVGVSPDHQGKGLGSAVVLPGVEAAERAGVPAFLETSAPRNLPFYERLGFTVTADVEVPEGPRTWCMTRKPGA

SEQ ID NO: 10468 - protein, 664 aa, -Artificial-Sequence
MALPVTALLLPLALLLHAARPNAGVTQTPKFQVLKTGQSMTLQCAQDMNHEYMSWYRQDPGMGLRLIHYSVAIQTTDQGEVPNGYNVSRSTIEDFPLRLLSAAPSQTSVYFCASSYLGNTGELFFGEGSRLTVLEITQGLAVSTISSFFPPGYQVSFCLVMVLLFAVDTGLYFSVKTNIRSSTRDWKDHKFKWRKDPQDKRAKRSGSGATNFSLLKQAGDVEENPGPTSMDWIWRILFLVGAATGAHSFEQEVTQIPAALSVPEGENLVLNCSFTDSAIYNLQWFRQDPGKGLTSLLLIQSSQREQTSGRLNASLDKSSGRSTLYIAASQPGDSATYLCAVRPTSGGSYIPTFGRGTSLIVHPYTRITQGLAVSTISSFFPPGYQVSFCLVMVLLFAVDTGLYFSVKTNIRSSTRDWKDHKFKWRKDPQDKRAKRSGSGVKQTLNFDLLKLAGDVESNPGPSRGHMTEYKPTVRLATRDDVPRAVRTLAAAFADYPATRHTVDPDRHIERVTELQELFLTRVGLDIGKVWVADDGAAVAVWTTPESVEAGAVFAEIGPRMAELSGSRLAAQQQMEGLLAPHRPKEPAWFLATVGVSPDHQGKGLGSAVVLPGVEAAERAGVPAFLETSAPRNLPFYERLGFTVTADVEVPEGPRTWCMTRKPGA

SEQ ID NO: 10469 - protein, 900 aa, -Artificial-Sequence
MALPVTALLLPLALLLHAARPNAGVTQTPKFQVLKTGQSMTLQCAQDMNHEYMSWYRQDPGMGLRLIHYSVAIQTTDQGEVPNGYNVSRSTIEDFPLRLLSAAPSQTSVYFCASSYLGNTGELFFGEGSRLTVLELWVSQPPEIRTLEGSSAFLPCSFNASQGRLAIGSVTWFRDEVVPGKEVRNGTPEFRGRLAPLASSRFLHDHQAELHIRDVRGHDASIYVCRVEVLGLGVGTGNGTRLVVEKEHPQLGAGTVLLLRAGFYAVSFLSVAVGSTVYYQGKCLTWKGPRRQLPAVVPAPLPPPCGSSAHLLPPVPGGRAKRSGSGATNFSLLKQAGDVEENPGPTSMDWIWRILFLVGAATGAHSFEQEVTQIPAALSVPEGENLVLNCSFTDSAIYNLQWFRQDPGKGLTSLLLIQSSQREQTSGRLNASLDKSSGRSTLYIAASQPGDSATYLCAVRPTSGGSYIPTFGRGTSLIVHPYTRLWVSQPPEIRTLEGSSAFLPCSFNASQGRLAIGSVTWFRDEVVPGKEVRNGTPEFRGRLAPLASSRFLHDHQAELHIRDVRGHDASIYVCRVEVLGLGVGTGNGTRLVVEKEHPQLGAGTVLLLRAGFYAVSFLSVAVGSTVYYQGKCLTWKGPRRQLPAVVPAPLPPPCGSSAHLLPPVPGGRAKRSGSGVKQTLNFDLLKLAGDVESNPGPSRGHMTEYKPTVRLATRDDVPRAVRTLAAAFADYPATRHTVDPDRHIERVTELQELFLTRVGLDIGKVWVADDGAAVAVWTTPESVEAGAVFAEIGPRMAELSGSRLAAQQQMEGLLAPHRPKEPAWFLATVGVSPDHQGKGLGSAVVLPGVEAAERAGVPAFLETSAPRNLPFYERLGFTVTADVEVPEGPRTWCMTRKPGA

SEQ ID NO: 10470 - protein, 900 aa, -Artificial-Sequence; identical to SEQ ID NO: 10469

SEQ ID NO: 10471 - protein, 796 aa, -Artificial-Sequence
MALPVTALLLPLALLLHAARPNAGVTQTPKFQVLKTGQSMTLQCAQDMNHEYMSWYRQDPGMGLRLIHYSVAIQTTDQGEVPNGYNVSRSTIEDFPLRLLSAAPSQTSVYFCASSYLGNTGELFFGEGSRLTVGQPKANPTVTLFPPSSEELQANKATLVCLISDFYPGAVTVAWKADGSPVKAGVETTKPSKQSNNKYAASSYLSLTPEQWKSHRSYSCQVTHEGSTVEKTVAPTECSGSQSFGLLDPKLCYLLDGILFIYGVILTALFLRVKFSRSADAPAYQQGQNQLYNELNLGRREEYDVLDKRRGRDPEMGGKPQRRKNPQEGLYNELQKDKMAEAYSEIGMKGERRRGKGHDGLYQGLSTATKDTYDALHMQALPPRRAKRSGSGATNFSLLKQAGDVEENPGPTSMDWIWRILFLVGAATGAHSFEQEVTQIPAALSVPEGENLVLNCSFTDSAIYNLQWFRQDPGKGLTSLLLIQSSQREQTSGRLNASLDKSSGRSTLYIAASQPGDSATYLCAVRPTSGGSYIPTFGRGTSLIVHPYASTKGPSVFPLAPSSKSTSGGTAALGCLVKDYFPEPVTVSWNSGALTSGVHTFPAVLQSSGLYSLSSVVTVPSSSLGTQTYICNVNHKPSNTKVDKRVEPKSCGTQSFGLLDPKLCYLLDGILFIYGVILTALFLRVKFSRSADAPAYQQGQNQLYNELNLGRREEYDVLDKRRGRDPEMGGKPQRRKNPQEGLYNELQKDKMAEAYSEIGMKGERRRGKGHDGLYQGLSTATKDTYDALHMQALPPR

SEQ ID NO: 10472 - protein, 562 aa, -Artificial-Sequence
MALPVTALLLPLALLLHAARPNAGVTQTPKFQVLKTGQSMTLQCAQDMNHEYMSWYRQDPGMGLRLIHYSVAIQTTDQGEVPNGYNVSRSTIEDFPLRLLSAAPSQTSVYFCASSYLGNTGELFFGEGSRLTVLEQSFGLLDPKLCYLLDGILFIYGVILTALFLRVKFSRSADAPAYQQGQNQLYNELNLGRREEYDVLDKRRGRDPEMGGKPQRRKNPQEGLYNELQKDKMAEAYSEIGMKGERRRGKGHDGLYQGLSTATKDTYDALHMQALPPRRAKRSGSGATNFSLLKQAGDVEENPGPTSMDWIWRILFLVGAATGAHSFEQEVTQIPAALSVPEGENLVLNCSFTDSAIYNLQWFRQDPGKGLTSLLLIQSSQREQTSGRLNASLDKSSGRSTLYIAASQPGDSATYLCAVRPTSGGSYIPTFGRGTSLIVHPYTRQSFGLLDPKLCYLLDGILFIYGVILTALFLRVKFSRSADAPAYQQGQNQLYNELNLGRREEYDVLDKRRGRDPEMGGKPQRRKNPQEGLYNELQKDKMAEAYSEIGMKGERRRGKGHD

SEQ ID NO: 10473 - protein, 910 aa, -Artificial-Sequence
MALPVTALLLPLALLLHAARPNAGVTQTPKFQVLKTGQSMTLQCAQDMNHEYMSWYRQDPGMGLRLIHYSVAIQTTDQGEVPNGYNVSRSTIEDFPLRLLSAAPSQTSVYFCASSYLGNTGELFFGEGSRLTVLETTPGERSSLPAFYPGTSGSCSGCGSLSLPLLAGLVAADAVASLLIVGAVFLCARPRRSPAQEDGKVYINMPGRGSTSRVKFSRSADAPAYQQGQNQLYNELNLGRREEYDVLDKRRGRDPEMGGKPQRRKNPQEGLYNELQKDKMAEAYSEIGMKGERRRGKGHDGLYQGLSTATKDTYDALHMQALPPRRAKRSGSGATNFSLLKQAGDVEENPGPMDWIWRILFLVGAATGAHSFEQEVTQIPAALSVPEGENLVLNCSFTDSAIYNLQWFRQDPGKGLTSLLLIQSSQREQTSGRLNASLDKSSGRSTLYIAASQPGDSATYLCAVRPTSGGSYIPTFGRGTSLIVHPYTRTTPGERSSLPAFYPGTSGSCSGCGSLSLPLLAGLVAADAVASLLIVGAVFLCARPRRSPAQEDGKVYINMPGRGSSRRVKFSRSADAPAYQQGQNQLYNELNLGRREEYDVLDKRRGRDPEMGGKPQRRKNPQEGLYNELQKDKMAEAYSEIGMKGERRRGKGHDGLYQGLSTATKDTYDALHMQALPPRRAKRSGSGVKQTLNFDLLKLAGDVESNPGPGHMTEYKPTVRLATRDDVPRAVRTLAAAFADYPATRHTVDPDRHIERVTELQELFLTRVGLDIGKVWVADDGAAVAVWTTPESVEAGAVFAEIGPRMAELSGSRLAAQQQMEGLLAPHRPKEPAWFLATVGVSPDHQGKGLGSAVVLPGVEAAERAGVPAFLETSAPRNLPFYERLGFTVTADVEVPEGPRTWCMTRKPGA

SEQ ID NO: 10474 - protein, 910 aa, -Artificial-Sequence; identical to SEQ ID NO: 10473

SEQ ID NO: 10475 - protein, 1112 aa, -Artificial-Sequence
MALPVTALLLPLALLLHAARPNAGVTQTPKFQVLKTGQSMTLQCAQDMNHEYMSWYRQDPGMGLRLIHYSVAIQTTDQGEVPNGYNVSRSTIEDFPLRLLSAAPSQTSVYFCASSYLGNTGELFFGEGSRLTVLEGQPKANPTVTLFPPSSEELQANKATLVCLISDFYPGAVTVAWKADGSPVKAGVETTKPSKQSNNKYAASSYLSLTPEQWKSHRSYSCQVTHEGSTVEKTVAPTECSGSTTPGERSSLPAFYPGTSGSCSGCGSLSLPLLAGLVAADAVASLLIVGAVFLCARPRRSPAQEDGKVYINMPGRGSTSRVKFSRSADAPAYQQGQNQLYNELNLGRREEYDVLDKRRGRDPEMGGKPQRRKNPQEGLYNELQKDKMAEAYSEIGMKGERRRGKGHDGLYQGLSTATKDTYDALHMQALPPRRAKRSGSGATNFSLLKQAGDVEENPGPMDWIWRILFLVGAATGAHSFEQEVTQIPAALSVPEGENLVLNCSFTDSAIYNLQWFRQDPGKGLTSLLLIQSSQREQTSGRLNASLDKSSGRSTLYIAASQPGDSATYLCAVRPTSGGSYIPTFGRGTSLIVHPYTRASTKGPSVFPLAPSSKSTSGGTAALGCLVKDYFPEPVTVSWNSGALTSGVHTFPAVLQSSGLYSLSSVVTVPSSSLGTQTYICNVNHKPSNTKVDKRVEPKSCGTTTPGERSSLPAFYPGTSGSCSGCGSLSLPLLAGLVAADAVASLLIVGAVFLCARPRRSPAQEDGKVYINMPGRGSSRRVKFSRSADAPAYQQGQNQLYNELNLGRREEYDVLDKRRGRDPEMGGKPQRRKNPQEGLYNELQKDKMAEAYSEIGMKGERRRGKGHDGLYQGLSTATKDTYDALHMQALPPRRAKRSGSGVKQTLNFDLLKLAGDVESNPGPGHMATYEVLCEVARKLGTDDREVVLFLLNVFIPQPTLAQLIGALRALKEEGRLTFPLLAECLFRAGRRDLLRDLLHLDPRFLERHLAGTMSYFSPYQLTVLHVDGELCARDIRSLIFLSKDTIGSRSTPQTFLHWVYCMENLDLLGPTDVDALMSMLRSLSRVDLQRQVQTLMGLHLSGPSHSQHYRHTP

SEQ ID NO: 10476 - protein, 1165 aa, -Artificial-Sequence
MALPVTALLLPLALLLHAARPNAGVTQTPKFQVLKTGQSMTLQCAQDMNHEYMSWYRQDPGMGLRLIHYSVAIQTTDQGEVPNGYNVSRSTIEDFPLRLLSAAPSQTSVYFCASSYLGNTGELFFGEGSRLTVLEGQPKANPTVTLFPPSSEELQANKATLVCLISDFYPGAVTVAWKADGSPVKAGVETTKPSKQSNNKYAASSYLSLTPEQWKSHRSYSCQVTHEGSTVEKTVAPTECSGSTTPGERSSLPAFYPGTSGSCSGCGSLSLPLLAGLVAADAVASLLIVGAVFLCARPRRSPAQEDGKVYINMPGRGSTSRVKFSRSADAPAYQQGQNQLYNELNLGRREEYDVLDKRRGRDPEMGGKPQRRKNPQEGLYNELQKDKMAEAYSEIGMKGERRRGKGHDGLYQGLSTATKDTYDALHMQALPPRRAKRSGSGATNFSLLKQAGDVEENPGPMDWIWRILFLVGAATGAHSFEQEVTQIPAALSVPEGENLVLNCSFTDSAIYNLQWFRQDPGKGLTSLLLIQSSQREQTSGRLNASLDKSSGRSTLYIAASQPGDSATYLCAVRPTSGGSYIPTFGRGTSLIVHPYTRASTKGPSVFPLAPSSKSTSGGTAALGCLVKDYFPEPVTVSWNSGALTSGVHTFPAVLQSSGLYSLSSVVTVPSSSLGTQTYICNVNHKPSNTKVDKRVEPKSCGTTTPGERSSLPAFYPGTSGSCSGCGSLSLPLLAGLVAADAVASLLIVGAVFLCARPRRSPAQEDGKVYINMPGRGSSRRVKFSRSADAPAYQQGQNQLYNELNLGRREEYDVLDKRRGRDPEMGGKPQRRKNPQEGLYNELQKDKMAEAYSEIGMKGERRRGKGHDGLYQGLSTATKDTYDALHMQALPPRRAKRSGSGVKQTLNFDLLKLAGDVESNPGPGHMSDSKEVPSLPFLRHLLEELDSHEDSLLLFLCHDAAPGCTTVTQALCSLSQQRKLTLAALVEMLYVLQRMDLLKSRFGLSKEGAEQLLGTSFLTRYRKLMVCVGEELDSSELRALRLFACNLNPSLSTALSESSRFVELVLALENVGLVSPSSVSVLADMLRTLRRLDLCQQLVEYEQQEQARYRYCYAASPSLPVRTLRRGHGASEHEQLCMPVQESSDSPELLRTPVQESSSDSPEQTT

SEQ ID NO: 10477 - protein, 1123 aa, -Artificial-Sequence
MALPVTALLLPLALLLHAARPNAGVTQTPKFQVLKTGQSMTLQCAQDMNHEYMSWYRQDPGMGLRLIHYSVAIQTTDQGEVPNGYNVSRSTIEDFPLRLLSAAPSQTSVYFCASSYLGNTGELFFGEGSRLTVLEGQPKANPTVTLFPPSSEELQANKATLVCLISDFYPGAVTVAWKADGSPVKAGVETTKPSKQSNNKYAASSYLSLTPEQWKSHRSYSCQVTHEGSTVEKTVAPTECSGSTTPGERSSLPAFYPGTSGSCSGCGSLSLPLLAGLVAADAVASLLIVGAVFLCARPRRSPAQEDGKVYINMPGRGSTSRVKFSRSADAPAYQQGQNQLYNELNLGRREEYDVLDKRRGRDPEMGGKPQRRKNPQEGLYNELQKDKMAEAYSEIGMKGERRRGKGHDGLYQGLSTATKDTYDALHMQALPPRRAKRSGSGATNFSLLKQAGDVEENPGPMDWIWRILFLVGAATGAHSFEQEVTQIPAALSVPEGENLVLNCSFTDSAIYNLQWFRQDPGKGLTSLLLIQSSQREQTSGRLNASLDKSSGRSTLYIAASQPGDSATYLCAVRPTSGGSYIPTFGRGTSLIVHPYTRASTKGPSVFPLAPSSKSTSGGTAALGCLVKDYFPEPVTVSWNSGALTSGVHTFPAVLQSSGLYSLSSVVTVPSSSLGTQTYICNVNHKPSNTKVDKRVEPKSCGTTTPGERSSLPAFYPGTSGSCSGCGSLSLPLLAGLVAADAVASLLIVGAVFLCARPRRSPAQEDGKVYINMPGRGSSRRVKFSRSADAPAYQQGQNQLYNELNLGRREEYDVLDKRRGRDPEMGGKPQRRKNPQEGLYNELQKDKMAEAYSEIGMKGERRRGKGHDGLYQGLSTATKDTYDALHMQALPPRRAKRSGSGVKQTLNFDLLKLAGDVESNPGPGHMTEYKPTVRLATRDDVPRAVRTLAAAFADYPATRHTVDPDRHIERVTELQELFLTRVGLDIGKVWVADDGAAVAVWTTPESVEAGAVFAEIGPRMAELSGSRLAAQQQMEGLLAPHRPKEPAWFLATVGVSPDHQGKGLGSAVVLPGVEAAERAGVPAFLETSAPRNLPFYERLGFTVTADVEVPEGPRTWCMTRKPGA

SEQ ID NO: 10478 - protein, 1260 aa, -Artificial-Sequence
MALPVTALLLPLALLLHAARPEVQLVESGGGLVQAGGSLRLSCAASGRTFSMGWFRQAPGKEREFVAAITYSGGSPYYADSVKGRFTISRDNAKNTVYLQMNSLKPEDTAVYYCAANPTYGSDWNAENWGQGTQVTVSSGTGGGGSGGGGSGGGGSEFNAGVTQTPKFQVLKTGQSMTLQCAQDMNHEYMSWYRQDPGMGLRLIHYSVAIQTTDQGEVPNGYNVSRSTIEDFPLRLLSAAPSQTSVYFCASSYLGNTGELFFGEGSRLTVLEGQPKANPTVTLFPPSSEELQANKATLVCLISDFYPGAVTVAWKADGSPVKAGVETTKPSKQSNNKYAASSYLSLTPEQWKSHRSYSCQVTHEGSTVEKTVAPTECSGSTTPGERSSLPAFYPGTSGSCSGCGSLSLPLLAGLVAADAVASLLIVGAVFLCARPRRSPAQEDGKVYINMPGRGSTSRVKFSRSADAPAYQQGQNQLYNELNLGRREEYDVLDKRRGRDPEMGGKPQRRKNPQEGLYNELQKDKMAEAYSEIGMKGERRRGKGHDGLYQGLSTATKDTYDALHMQALPPRRAKRSGSGATNFSLLKQAGDVEENPGPMDWIWRILFLVGAATGAHSFEQEVTQIPAALSVPEGENLVLNCSFTDSAIYNLQWFRQDPGKGLTSLLLIQSSQREQTSGRLNASLDKSSGRSTLYIAASQPGDSATYLCAVRPTSGGSYIPTFGRGTSLIVHPYTRASTKGPSVFPLAPSSKSTSGGTAALGCLVKDYFPEPVTVSWNSGALTSGVHTFPAVLQSSGLYSLSSVVTVPSSSLGTQTYICNVNHKPSNTKVDKRVEPKSCGTTTPGERSSLPAFYPGTSGSCSGCGSLSLPLLAGLVAADAVASLLIVGAVFLCARPRRSPAQEDGKVYINMPGRGSSRRVKFSRSADAPAYQQGQNQLYNELNLGRREEYDVLDKRRGRDPEMGGKPQRRKNPQEGLYNELQKDKMAEAYSEIGMKGERRRGKGHDGLYQGLSTATKDTYDALHMQALPPRRAKRSGSGVKQTLNFDLLKLAGDVESNPGPGHMTEYKPTVRLATRDDVPRAVRTLAAAFADYPATRHTVDPDRHIERVTELQELFLTRVGLDIGKVWVADDGAAVAVWTTPESVEAGAVFAEIGPRMAELSGSRLAAQQQMEGLLAPHRPKEPAWFLATVGVSPDHQGKGLGSAVVLPGVEAAERAGVPAFLETSAPRNLPFYERLGFTVTADVEVPEGPRTWCMTRKPGA

SEQ ID NO: 10479 - protein, 1397 aa, -Artificial-Sequence
MALPVTALLLPLALLLHAARPEVQLVESGGGLVQAGGSLRLSCAASGRTFSMGWFRQAPGKEREFVAAITYSGGSPYYADSVKGRFTISRDNAKNTVYLQMNSLKPEDTAVYYCAANPTYGSDWNAENWGQGTQVTVSSGTGGGGSGGGGSGGGGSEFNAGVTQTPKFQVLKTGQSMTLQCAQDMNHEYMSWYRQDPGMGLRLIHYSVAIQTTDQGEVPNGYNVSRSTIEDFPLRLLSAAPSQTSVYFCASSYLGNTGELFFGEGSRLTVLEGQPKANPTVTLFPPSSEELQANKATLVCLISDFYPGAVTVAWKADGSPVKAGVETTKPSKQSNNKYAASSYLSLTPEQWKSHRSYSCQVTHEGSTVEKTVAPTECSGSTTPGERSSLPAFYPGTSGSCSGCGSLSLPLLAGLVAADAVASLLIVGAVFLCARPRRSPAQEDGKVYINMPGRGSTSRVKFSRSADAPAYQQGQNQLYNELNLGRREEYDVLDKRRGRDPEMGGKPQRRKNPQEGLYNELQKDKMAEAYSEIGMKGERRRGKGHDGLYQGLSTATKDTYDALHMQALPPRRAKRSGSGATNFSLLKQAGDVEENPGPMDWIWRILFLVGAATGAHSGPEVQLVESGGGLVQAGGSLRLSCAASGRTFTMGWFRQAPGKEREFVAAISLSPTLAYYADSVKGRFTISRDNAKNTVVLQMNSLKPEDTALYYCAADRKSVMSIRPDYWGQGTQVTVSSGSGGGGSGGGGSGGGGSFEQEVTQIPAALSVPEGENLVLNCSFTDSAIYNLQWFRQDPGKGLTSLLLIQSSQREQTSGRLNASLDKSSGRSTLYIAASQPGDSATYLCAVRPTSGGSYIPTFGRGTSLIVHPYTRASTKGPSVFPLAPSSKSTSGGTAALGCLVKDYFPEPVTVSWNSGALTSGVHTFPAVLQSSGLYSLSSVVTVPSSSLGTQTYICNVNHKPSNTKVDKRVEPKSCGTTTPGERSSLPAFYPGTSGSCSGCGSLSLPLLAGLVAADAVASLLIVGAVFLCARPRRSPAQEDGKVYINMPGRGSSRRVKFSRSADAPAYQQGQNQLYNELNLGRREEYDVLDKRRGRDPEMGGKPQRRKNPQEGLYNELQKDKMAEAYSEIGMKGERRRGKGHDGLYQGLSTATKDTYDALHMQALPPRRAKRSGSGVKQTLNFDLLKLAGDVESNPGPGHMTEYKPTVRLATRDDVPRAVRTLAAAFADYPATRHTVDPDRHIERVTELQELFLTRVGLDIGKVWVADDGAAVAVWTTPESVEAGAVFAEIGPRMAELSGSRLAAQQQMEGLLAPHRPKEPAWFLATVGVSPDHQGKGLGSAVVLPGVEAAERAGVPAFLETSAPRNLPFYERLGFTVTADVEVPEGPRTWCMTRKPGA

SEQ ID NO: 10480 - protein, 817 aa, -Artificial-Sequence; identical to SEQ ID NO: 10447

SEQ ID NO: 10481 - protein, 859 aa, -Artificial-Sequence
MALPVTALLLPLALLLHAARPEFNAGVTQTPKFQVLKTGQSMTLQCAQDMNHEYMSWYRQDPGMGLRLIHYSVAIQTTDQGEVPNGYNVSRSTIEDFPLRLLSAAPSQTSVYFCASSYLGNTGELFFGEGSRLTVLEDLKNVFPPEVAVFEPSEAEISHTQKATLVCLATGFYPDHVELSWWVNGKEVHSGVSTDPQPLKEQPALNDSRYCLSSRLRVSATFWQNPRNHFRCQVQFYGLSENDEWTQDRAKPVTQIVSAEAWGRADCGSQSFGLLDPKLCYLLDGILFIYGVILTALFLRVKFSRSADAPAYQQGQNQLYNELNLGRREEYDVLDKRRGRDPEMGGKPQRRKNPQEGLYNELQKDKMAEAYSEIGMKGERRRGKGHDGLYQGLSTATKDTYDALHMQALPPRRAKRSGSGATNFSLLKQAGDVEENPGPTSMDWIWRILFLVGAATGAHSFEQEVTQIPAALSVPEGENLVLNCSFTDSAIYNLQWFRQDPGKGLTSLLLIQSSQREQTSGRLNASLDKSSGRSTLYIAASQPGDSATYLCAVRPTSGGSYIPTFGRGTSLIVHPYTRIQNPDPAVYQLRDSKSSDKSVCLFTDFDSQTNVSQSKDSDVYITDKTVLDMRSMDFKSNSAVAWSNKSDFACANAFNNSIIPEDTFFPSPESSCGTQSFGLLDPKLCYLLDGILFIYGVILTALFLKRGRKKLLYIFKQPFMRPVQTTQEEDGCSCRFPEEEEGGCELRVKFSRSADAPAYQQGQNQLYNELNLGRREEYDVLDKRRGRDPEMGGKPQRRKNPQEGLYNELQKDKMAEAYSEIGMKGERRRGKGHDGLYQGLSTATKDTYDALHMQALPPR

SEQ ID NO: 10482 - protein, 858 aa, -Artificial-Sequence
MALPVTALLLPLALLLHAARPEFNAGVTQTPKFQVLKTGQSMTLQCAQDMNHEYMSWYRQDPGMGLRLIHYSVAIQTTDQGEVPNGYNVSRSTIEDFPLRLLSAAPSQTSVYFCASSYLGNTGELFFGEGSRLTVLEDLKNVFPPEVAVFEPSEAEISHTQKATLVCLATGFYPDHVELSWWVNGKEVHSGVSTDPQPLKEQPALNDSRYCLSSRLRVSATFWQNPRNHFRCQVQFYGLSENDEWTQDRAKPVTQIVSAEAWGRADCGSQSFGLLDPKLCYLLDGILFIYGVILTALFLRVKFSRSADAPAYQQGQNQLYNELNLGRREEYDVLDKRRGRDPEMGGKPQRRKNPQEGLYNELQKDKMAEAYSEIGMKGERRRGKGHDGLYQGLSTATKDTYDALHMQALPPRRAKRSGSGATNFSLLKQAGDVEENPGPTSMDWIWRILFLVGAATGAHSFEQEVTQIPAALSVPEGENLVLNCSFTDSAIYNLQWFRQDPGKGLTSLLLIQSSQREQTSGRLNASLDKSSGRSTLYIAASQPGDSATYLCAVRPTSGGSYIPTFGRGTSLIVHPYTRIQNPDPAVYQLRDSKSSDKSVCLFTDFDSQTNVSQSKDSDVYITDKTVLDMRSMDFKSNSAVAWSNKSDFACANAFNNSIIPEDTFFPSPESSCGTQSFGLLDPKLCYLLDGILFIYGVILTALFLRSKRSRLLHSDYMNMTPRRPGPTRKHYQPYAPPRDFAAYRSRVKFSRSADAPAYQQGQNQLYNELNLGRREEYDVLDKRRGRDPEMGGKPQRRKNPQEGLYNELQKDKMAEAYSEIGMKGERRRGKGHDGLYQGLSTATKDTYDALHMQALPPR

SEQ ID NO: 10483 - protein, 853 aa, -Artificial-Sequence
MALPVTALLLPLALLLHAARPEFNAGVTQTPKFQVLKTGQSMTLQCAQDMNHEYMSWYRQDPGMGLRLIHYSVAIQTTDQGEVPNGYNVSRSTIEDFPLRLLSAAPSQTSVYFCASSYLGNTGELFFGEGSRLTVLEDLKNVFPPEVAVFEPSEAEISHTQKATLVCLATGFYPDHVELSWWVNGKEVHSGVSTDPQPLKEQPALNDSRYCLSSRLRVSATFWQNPRNHFRCQVQFYGLSENDEWTQDRAKPVTQIVSAEAWGRADCGSQSFGLLDPKLCYLLDGILFIYGVILTALFLRVKFSRSADAPAYQQGQNQLYNELNLGRREEYDVLDKRRGRDPEMGGKPQRRKNPQEGLYNELQKDKMAEAYSEIGMKGERRRGKGHDGLYQGLSTATKDTYDALHMQALPPRRAKRSGSGATNFSLLKQAGDVEENPGPTSMDWIWRILFLVGAATGAHSFEQEVTQIPAALSVPEGENLVLNCSFTDSAIYNLQWFRQDPGKGLTSLLLIQSSQREQTSGRLNASLDKSSGRSTLYIAASQPGDSATYLCAVRPTSGGSYIPTFGRGTSLIVHPYTRIQNPDPAVYQLRDSKSSDKSVCLFTDFDSQTNVSQSKDSDVYITDKTVLDMRSMDFKSNSAVAWSNKSDFACANAFNNSIIPEDTFFPSPESSCGTQSFGLLDPKLCYLLDGILFIYGVILTALFLRDQRLPPDAHKPPGGGSFRTPIQEEQADAHSTLAKIRVKFSRSADAPAYQQGQNQLYNELNLGRREEYDVLDKRRGRDPEMGGKPQRRKNPQEGLYNELQKDKMAEAYSEIGMKGERRRGKGHDGLYQGLSTATKDTYDALHMQALPPR

SEQ ID NO: 10484 - protein, 937 aa, -Artificial-Sequence
MALPVTALLLPLALLLHAARPEFNAGVTQTPKFQVLKTGQSMTLQCAQDMNHEYMSWYRQDPGMGLRLIHYSVAIQTTDQGEVPNGYNVSRSTIEDFPLRLLSAAPSQTSVYFCASSYLGNTGELFFGEGSRLTVLEDLKNVFPPEVAVFEPSEAEISHTQKATLVCLATGFYPDHVELSWWVNGKEVHSGVSTDPQPLKEQPALNDSRYCLSSRLRVSATFWQNPRNHFRCQVQFYGLSENDEWTQDRAKPVTQIVSAEAWGRADCGSQSFGLLDPKLCYLLDGILFIYGVILTALFLRVKFSRSADAPAYQQGQNQLYNELNLGRREEYDVLDKRRGRDPEMGGKPQRRKNPQEGLYNELQKDKMAEAYSEIGMKGERRRGKGHDGLYQGLSTATKDTYDALHMQALPPRRAKRSGSGATNFSLLKQAGDVEENPGPTSMDWIWRILFLVGAATGAHSFEQEVTQIPAALSVPEGENLVLNCSFTDSAIYNLQWFRQDPGKGLTSLLLIQSSQREQTSGRLNASLDKSSGRSTLYIAASQPGDSATYLCAVRPTSGGSYIPTFGRGTSLIVHPYTRIQNPDPAVYQLRDSKSSDKSVCLFTDFDSQTNVSQSKDSDVYITDKTVLDMRSMDFKSNSAVAWSNKSDFACANAFNNSIIPEDTFFPSPESSCGTQSFGLLDPKLCYLLDGILFIYGVILTALFLWRRKRKEKQSETSPKEFLTIYEDVKDLKTRRNHEQEQTFPGGGSTIYSMIQSQSSAPTSQEPAYTLYSLIQPSRKSGSRKRNHSPSFNSTIYEVIGKSQPKAQNPARLSRKELENFDVYSRVKFSRSADAPAYQQGQNQLYNELNLGRREEYDVLDKRRGRDPEMGGKPQRRKNPQEGLYNELQKDKMAEAYSEIGMKGERRRGKGHDGLYQGLSTATKDTYDALHMQALPPR

SEQ ID NO: 10485 - protein, 900 aa, -Artificial-Sequence
MALPVTALLLPLALLLHAARPEFNAGVTQTPKFQVLKTGQSMTLQCAQDMNHEYMSWYRQDPGMGLRLIHYSVAIQTTDQGEVPNGYNVSRSTIEDFPLRLLSAAPSQTSVYFCASSYLGNTGELFFGEGSRLTVLEDLKNVFPPEVAVFEPSEAEISHTQKATLVCLATGFYPDHVELSWWVNGKEVHSGVSTDPQPLKEQPALNDSRYCLSSRLRVSATFWQNPRNHFRCQVQFYGLSENDEWTQDRAKPVTQIVSAEAWGRADCGSQSFGLLDPKLCYLLDGILFIYGVILTALFLRSKRSRLLHSDYMNMTPRRPGPTRKHYQPYAPPRDFAAYRSRVKFSRSADAPAYQQGQNQLYNELNLGRREEYDVLDKRRGRDPEMGGKPQRRKNPQEGLYNELQKDKMAEAYSEIGMKGERRRGKGHDGLYQGLSTATKDTYDALHMQALPPRRAKRSGSGATNFSLLKQAGDVEENPGPTSMDWIWRILFLVGAATGAHSFEQEVTQIPAALSVPEGENLVLNCSFTDSAIYNLQWFRQDPGKGLTSLLLIQSSQREQTSGRLNASLDKSSGRSTLYIAASQPGDSATYLCAVRPTSGGSYIPTFGRGTSLIVHPYTRIQNPDPAVYQLRDSKSSDKSVCLFTDFDSQTNVSQSKDSDVYITDKTVLDMRSMDFKSNSAVAWSNKSDFACANAFNNSIIPEDTFFPSPESSCGTQSFGLLDPKLCYLLDGILFIYGVILTALFLKRGRKKLLYIFKQPFMRPVQTTQEEDGCSCRFPEEEEGGCELRVKFSRSADAPAYQQGQNQLYNELNLGRREEYDVLDKRRGRDPEMGGKPQRRKNPQEGLYNELQKDKMAEAYSEIGMKGERRRGKGHDGLYQGLSTATKDTYDALHMQALPPR

SEQ ID NO: 10486 - protein, 899 aa, -Artificial-Sequence
MALPVTALLLPLALLLHAARPEFNAGVTQTPKFQVLKTGQSMTLQCAQDMNHEYMSWYRQDPGMGLRLIHYSVAIQTTDQGEVPNGYNVSRSTIEDFPLRLLSAAPSQTSVYFCASSYLGNTGELFFGEGSRLTVLEDLKNVFPPEVAVFEPSEAEISHTQKATLVCLATGFYPDHVELSWWVNGKEVHSGVSTDPQPLKEQPALNDSRYCLSSRLRVSATFWQNPRNHFRCQVQFYGLSENDEWTQDRAKPVTQIVSAEAWGRADCGSQSFGLLDPKLCYLLDGILFIYGVILTALFLRSKRSRLLHSDYMNMTPRRPGPTRKHYQPYAPPRDFAAYRSRVKFSRSADAPAYQQGQNQLYNELNLGRREEYDVLDKRRGRDPEMGGKPQRRKNPQEGLYNELQKDKMAEAYSEIGMKGERRRGKGHDGLYQGLSTATKDTYDALHMQALPPRRAKRSGSGATNFSLLKQAGDVEENPGPTSMDWIWRILFLVGAATGAHSFEQEVTQIPAALSVPEGENLVLNCSFTDSAIYNLQWFRQDPGKGLTSLLLIQSSQREQTSGRLNASLDKSSGRSTLYIAASQPGDSATYLCAVRPTSGGSYIPTFGRGTSLIVHPYTRIQNPDPAVYQLRDSKSSDKSVCLFTDFDSQTNVSQSKDSDVYITDKTVLDMRSMDFKSNSAVAWSNKSDFACANAFNNSIIPEDTFFPSPESSCGTQSFGLLDPKLCYLLDGILFIYGVILTALFLRSKRSRLLHSDYMNMTPRRPGPTRKHYQPYAPPRDFAAYRSRVKFSRSADAPAYQQGQNQLYNELNLGRREEYDVLDKRRGRDPEMGGKPQRRKNPQEGLYNELQKDKMAEAYSEIGMKGERRRGKGHDGLYQGLSTATKDTYDALHMQALPPR

SEQ ID NO: 10487 - protein, 900 aa, -Artificial-Sequence; identical to SEQ ID NO: 10485

SEQ ID NO: 10488 - protein, 817 aa, -Artificial-Sequence
MALPVTALLLPLALLLHAARPEFNAGVTQTPKFQVLKTGQSMTLQCAQDMNHEYMSWYRQDPGMGLRLIHYSVAIQTTDQGEVPNGYNVSRSTIEDFPLRLLSAAPSQTSVYFCASSYLGNTGELFFGEGSRLTVLEDLKNVFPPEVAVFEPSEAEISHTQKATLVCLATGFYPDHVELSWWVNGKEVHSGVSTDPQPLKEQPALNDSRYCLSSRLRVSATFWQNPRNHFRCQVQFYGLSENDEWTQDRAKPVTQIVSAEAWGRADCGSQSFGLLDPKLCYLLDGILFIYGVILTALFLRVKFSRSADAPAYQQGQNQLYNELNLGRREEYDVLDKRRGRDPEMGGKPQRRKNPQEGLFNELQKDKMAEAFSEIGMKGERRRGKGHDGLFQGLSTATKDTFDALHMQALPPRRAKRSGSGATNFSLLKQAGDVEENPGPTSMDWIWRILFLVGAATGAHSFEQEVTQIPAALSVPEGENLVLNCSFTDSAIYNLQWFRQDPGKGLTSLLLIQSSQREQTSGRLNASLDKSSGRSTLYIAASQPGDSATYLCAVRPTSGGSYIPTFGRGTSLIVHPYTRIQNPDPAVYQLRDSKSSDKSVCLFTDFDSQTNVSQSKDSDVYITDKTVLDMRSMDFKSNSAVAWSNKSDFACANAFNNSIIPEDTFFPSPESSCGTQSFGLLDPKLCYLLDGILFIYGVILTALFLRVKFSRSADAPAYQQGQNQLYNELNLGRREEYDVLDKRRGRDPEMGGKPQRRKNPQEGLYNELQKDKMAEAYSEIGMKGERRRGKGHDGLYQGLSTATKDTYDALHMQALPPR

SEQ ID NO: 10489 - protein, 817 aa, -Artificial-Sequence; identical to SEQ ID NO: 10488

SEQ ID NO: 10490 - protein, 859 aa, -Artificial-Sequence
MALPVTALLLPLALLLHAARPEFNAGVTQTPKFQVLKTGQSMTLQCAQDMNHEYMSWYRQDPGMGLRLIHYSVAIQTTDQGEVPNGYNVSRSTIEDFPLRLLSAAPSQTSVYFCASSYLGNTGELFFGEGSRLTVLEDLKNVFPPEVAVFEPSEAEISHTQKATLVCLATGFYPDHVELSWWVNGKEVHSGVSTDPQPLKEQPALNDSRYCLSSRLRVSATFWQNPRNHFRCQVQFYGLSENDEWTQDRAKPVTQIVSAEAWGRADCGSQSFGLLDPKLCYLLDGILFIYGVILTALFLRVKFSRSADAPAYQQGQNQLYNELNLGRREEYDVLDKRRGRDPEMGGKPQRRKNPQEGLFNELQKDKMAEAFSEIGMKGERRRGKGHDGLFQGLSTATKDTFDALHMQALPPRRAKRSGSGATNFSLLKQAGDVEENPGPTSMDWIWRILFLVGAATGAHSFEQEVTQIPAALSVPEGENLVLNCSFTDSAIYNLQWFRQDPGKGLTSLLLIQSSQREQTSGRLNASLDKSSGRSTLYIAASQPGDSATYLCAVRPTSGGSYIPTFGRGTSLIVHPYTRIQNPDPAVYQLRDSKSSDKSVCLFTDFDSQTNVSQSKDSDVYITDKTVLDMRSMDFKSNSAVAWSNKSDFACANAFNNSIIPEDTFFPSPESSCGTQSFGLLDPKLCYLLDGILFIYGVILTALFLKRGRKKLLYIFKQPFMRPVQTTQEEDGCSCRFPEEEEGGCELRVKFSRSADAPAYQQGQNQLYNELNLGRREEYDVLDKRRGRDPEMGGKPQRRKNPQEGLYNELQKDKMAEAYSEIGMKGERRRGKGHDGLYQGLSTATKDTYDALHMQALPPR

SEQ ID NO: 10491 - protein, 858 aa, -Artificial-Sequence
MALPVTALLLPLALLLHAARPEFNAGVTQTPKFQVLKTGQSMTLQCAQDMNHEYMSWYRQDPGMGLRLIHYSVAIQTTDQGEVPNGYNVSRSTIEDFPLRLLSAAPSQTSVYFCASSYLGNTGELFFGEGSRLTVLEDLKNVFPPEVAVFEPSEAEISHTQKATLVCLATGFYPDHVELSWWVNGKEVHSGVSTDPQPLKEQPALNDSRYCLSSRLRVSATFWQNPRNHFRCQVQFYGLSENDEWTQDRAKPVTQIVSAEAWGRADCGSQSFGLLDPKLCYLLDGILFIYGVILTALFLRVKFSRSADAPAYQQGQNQLYNELNLGRREEYDVLDKRRGRDPEMGGKPQRRKNPQEGLFNELQKDKMAEAFSEIGMKGERRRGKGHDGLFQGLSTATKDTFDALHMQALPPRRAKRSGSGATNFSLLKQAGDVEENPGPTSMDWIWRILFLVGAATGAHSFEQEVTQIPAALSVPEGENLVLNCSFTDSAIYNLQWFRQDPGKGLTSLLLIQSSQREQTSGRLNASLDKSSGRSTLYIAASQPGDSATYLCAVRPTSGGSYIPTFGRGTSLIVHPYTRIQNPDPAVYQLRDSKSSDKSVCLFTDFDSQTNVSQSKDSDVYITDKTVLDMRSMDFKSNSAVAWSNKSDFACANAFNNSIIPEDTFFPSPESSCGTQSFGLLDPKLCYLLDGILFIYGVILTALFLRSKRSRLLHSDYMNMTPRRPGPTRKHYQPYAPPRDFAAYRSRVKFSRSADAPAYQQGQNQLYNELNLGRREEYDVLDKRRGRDPEMGGKPQRRKNPQEGLYNELQKDKMAEAYSEIGMKGERRRGKGHDGLYQGLSTATKDTYDALHMQALPPR

SEQ ID NO: 10492 - protein, 853 aa, -Artificial-Sequence
MALPVTALLLPLALLLHAARPEFNAGVTQTPKFQVLKTGQSMTLQCAQDMNHEYMSWYRQDPGMGLRLIHYSVAIQTTDQGEVPNGYNVSRSTIEDFPLRLLSAAPSQTSVYFCASSYLGNTGELFFGEGSRLTVLEDLKNVFPPEVAVFEPSEAEISHTQKATLVCLATGFYPDHVELSWWVNGKEVHSGVSTDPQPLKEQPALNDSRYCLSSRLRVSATFWQNPRNHFRCQVQFYGLSENDEWTQDRAKPVTQIVSAEAWGRADCGSQSFGLLDPKLCYLLDGILFIYGVILTALFLRVKFSRSADAPAYQQGQNQLYNELNLGRREEYDVLDKRRGRDPEMGGKPQRRKNPQEGLFNELQKDKMAEAFSEIGMKGERRRGKGHDGLFQGLSTATKDTFDALHMQALPPRRAKRSGSGATNFSLLKQAGDVEENPGPTSMDWIWRILFLVGAATGAHSFEQEVTQIPAALSVPEGENLVLNCSFTDSAIYNLQWFRQDPGKGLTSLLLIQSSQREQTSGRLNASLDKSSGRSTLYIAASQPGDSATYLCAVRPTSGGSYIPTFGRGTSLIVHPYTRIQNPDPAVYQLRDSKSSDKSVCLFTDFDSQTNVSQSKDSDVYITDKTVLDMRSMDFKSNSAVAWSNKSDFACANAFNNSIIPEDTFFPSPESSCGTQSFGLLDPKLCYLLDGILFIYGVILTALFLRDQRLPPDAHKPPGGGSFRTPIQEEQADAHSTLAKIRVKFSRSADAPAYQQGQNQLYNELNLGRREEYDVLDKRRGRDPEMGGKPQRRKNPQEGLYNELQKDKMAEAYSEIGMKGERRRGKGHDGLYQGLSTATKDTYDALHMQALPPR

SEQ ID NO: 10493 - protein, 937 aa, -Artificial-Sequence
MALPVTALLLPLALLLHAARPEFNAGVTQTPKFQVLKTGQSMTLQCAQDMNHEYMSWYRQDPGMGLRLIHYSVAIQTTDQGEVPNGYNVSRSTIEDFPLRLLSAAPSQTSVYFCASSYLGNTGELFFGEGSRLTVLEDLKNVFPPEVAVFEPSEAEISHTQKATLVCLATGFYPDHVELSWWVNGKEVHSGVSTDPQPLKEQPALNDSRYCLSSRLRVSATFWQNPRNHFRCQVQFYGLSENDEWTQDRAKPVTQIVSAEAWGRADCGSQSFGLLDPKLCYLLDGILFIYGVILTALFLRVKFSRSADAPAYQQGQNQLYNELNLGRREEYDVLDKRRGRDPEMGGKPQRRKNPQEGLFNELQKDKMAEAFSEIGMKGERRRGKGHDGLFQGLSTATKDTFDALHMQALPPRRAKRSGSGATNFSLLKQAGDVEENPGPTSMDWIWRILFLVGAATGAHSFEQEVTQIPAALSVPEGENLVLNCSFTDSAIYNLQWFRQDPGKGLTSLLLIQSSQREQTSGRLNASLDKSSGRSTLYIAASQPGDSATYLCAVRPTSGGSYIPTFGRGTSLIVHPYTRIQNPDPAVYQLRDSKSSDKSVCLFTDFDSQTNVSQSKDSDVYITDKTVLDMRSMDFKSNSAVAWSNKSDFACANAFNNSIIPEDTFFPSPESSCGTQSFGLLDPKLCYLLDGILFIYGVILTALFLWRRKRKEKQSETSPKEFLTIYEDVKDLKTRRNHEQEQTFPGGGSTIYSMIQSQSSAPTSQEPAYTLYSLIQPSRKSGSRKRNHSPSFNSTIYEVIGKSQPKAQNPARLSRKELENFDVYSRVKFSRSADAPAYQQGQNQLYNELNLGRREEYDVLDKRRGRDPEMGGKPQRRKNPQEGLYNELQKDKMAEAYSEIGMKGERRRGKGHDGLYQGLSTATKDTYDALHMQALPPR

SEQ ID NO: 10494 - protein, 858 aa, -Artificial-Sequence; identical to SEQ ID NO: 10491

SEQ ID NO: 10495 - protein, 859 aa, -Artificial-Sequence; identical to SEQ ID NO: 10490

SEQ ID NO: 10496 - protein, 817 aa, -Artificial-Sequence
MALPVTALLLPLALLLHAARPEFNAGVTQTPKFQVLKTGQSMTLQCAQDMNHEYMSWYRQDPGMGLRLIHYSVAIQTTDQGEVPNGYNVSRSTIEDFPLRLLSAAPSQTSVYFCASSYLGNTGELFFGEGSRLTVLEDLKNVFPPEVAVFEPSEAEISHTQKATLVCLATGFYPDHVELSWWVNGKEVHSGVSTDPQPLKEQPALNDSRYCLSSRLRVSATFWQNPRNHFRCQVQFYGLSENDEWTQDRAKPVTQIVSAEAWGRADCGSQSFGLLDPKLCYLLDGILFIYGVILTALFLRVKFSRSADAPAYQQGQNQLYNELNLGRREEYDVLDKRRGRDPEMGGKPQRRKNPQEGLFNELQKDKMAEAFSEIGMKGERRRGKGHDGLFQGLSTATKDTFDALHMQALPPRRAKRSGSGATNFSLLKQAGDVEENPGPTSMDWIWRILFLVGAATGAHSFEQEVTQIPAALSVPEGENLVLNCSFTDSAIYNLQWFRQDPGKGLTSLLLIQSSQREQTSGRLNASLDKSSGRSTLYIAASQPGDSATYLCAVRPTSGGSYIPTFGRGTSLIVHPYTRIQNPDPAVYQLRDSKSSDKSVCLFTDFDSQTNVSQSKDSDVYITDKTVLDMRSMDFKSNSAVAWSNKSDFACANAFNNSIIPEDTFFPSPESSCGTQSFGLLDPKLSYLLDGILFIYGVILTALFLRVKFSRSADAPAYQQGQNQLYNELNLGRREEYDVLDKRRGRDPEMGGKPQRRKNPQEGLYNELQKDKMAEAYSEIGMKGERRRGKGHDGLYQGLSTATKDTYDALHMQALPPR

SEQ ID NO: 10497 - protein, 817 aa, -Artificial-Sequence; identical to SEQ ID NO: 10496

SEQ ID NO: 10498 - protein, 817 aa, -Artificial-Sequence
MALPVTALLLPLALLLHAARPEFNAGVTQTPKFQVLKTGQSMTLQCAQDMNHEYMSWYRQDPGMGLRLIHYSVAIQTTDQGEVPNGYNVSRSTIEDFPLRLLSAAPSQTSVYFCASSYLGNTGELFFGEGSRLTVLEDLKNVFPPEVAVFEPSEAEISHTQKATLVCLATGFYPDHVELSWWVNGKEVHSGVSTDPQPLKEQPALNDSRYCLSSRLRVSATFWQNPRNHFRCQVQFYGLSENDEWTQDRAKPVTQIVSAEAWGRADCGSQSFGLLDPKLSYLLDGILFIYGVILTALFLRVKFSRSADAPAYQQGQNQLYNELNLGRREEYDVLDKRRGRDPEMGGKPQRRKNPQEGLYNELQKDKMAEAYSEIGMKGERRRGKGHDGLYQGLSTATKDTYDALHMQALPPRRAKRSGSGATNFSLLKQAGDVEENPGPTSMDWIWRILFLVGAATGAHSFEQEVTQIPAALSVPEGENLVLNCSFTDSAIYNLQWFRQDPGKGLTSLLLIQSSQREQTSGRLNASLDKSSGRSTLYIAASQPGDSATYLCAVRPTSGGSYIPTFGRGTSLIVHPYTRIQNPDPAVYQLRDSKSSDKSVCLFTDFDSQTNVSQSKDSDVYITDKTVLDMRSMDFKSNSAVAWSNKSDFACANAFNNSIIPEDTFFPSPESSCGTQSFGLLDPKLSYLLDGILFIYGVILTALFLRVKFSRSADAPAYQQGQNQLYNELNLGRREEYDVLDKRRGRDPEMGGKPQRRKNPQEGLYNELQKDKMAEAYSEIGMKGERRRGKGHDGLYQGLSTATKDTYDALHMQALPPR

SEQ ID NO: 10499 - protein, 721 aa, -Artificial-Sequence
MALPVTALLLPLALLLHAARPEFNAGVTQTPKFQVLKTGQSMTLQCAQDMNHEYMSWYRQDPGMGLRLIHYSVAIQTTDQGEVPNGYNVSRSTIEDFPLRLLSAAPSQTSVYFCASSYLGNTGELFFGEGSRLTVLEDLKNVFPPEVAVFEPSEAEISHTQKATLVCLATGFYPDHVELSWWVNGKEVHSGVSTDPQPLKEQPALNDSRYCLSSRLRVSATFWQNPRNHFRCQVQFYGLSENDEWTQDRAKPVTQIVSAEAWGRADCGSTTPGERSSLPAFYPGTSGSCSGCGSLSLPLLAGLVAADAVASLLIVGAVFLCARPRRSPAQEDGKVYINMPGRGRAKRSGSGATNFSLLKQAGDVEENPGPTSMDWIWRILFLVGAATGAHSFEQEVTQIPAALSVPEGENLVLNCSFTDSAIYNLQWFRQDPGKGLTSLLLIQSSQREQTSGRLNASLDKSSGRSTLYIAASQPGDSATYLCAVRPTSGGSYIPTFGRGTSLIVHPYTRIQNPDPAVYQLRDSKSSDKSVCLFTDFDSQTNVSQSKDSDVYITDKTVLDMRSMDFKSNSAVAWSNKSDFACANAFNNSIIPEDTFFPSPESSCGTTTPGERSSLPAFYPGTSGSCSGCGSLSLPLLAGLVAADAVASLLIVGAVFKRGRKKLLYIFKQPFMRPVQTTQEEDGCSCRFPEEEEGGCELLCARPRRSPAQEDGKVYINMPGRG

SEQ ID NO: 10500 - protein, 720 aa, -Artificial-Sequence
MALPVTALLLPLALLLHAARPEFNAGVTQTPKFQVLKTGQSMTLQCAQDMNHEYMSWYRQDPGMGLRLIHYSVAIQTTDQGEVPNGYNVSRSTIEDFPLRLLSAAPSQTSVYFCASSYLGNTGELFFGEGSRLTVLEDLKNVFPPEVAVFEPSEAEISHTQKATLVCLATGFYPDHVELSWWVNGKEVHSGVSTDPQPLKEQPALNDSRYCLSSRLRVSATFWQNPRNHFRCQVQFYGLSENDEWTQDRAKPVTQIVSAEAWGRADCGSTTPGERSSLPAFYPGTSGSCSGCGSLSLPLLAGLVAADAVASLLIVGAVFLCARPRRSPAQEDGKVYINMPGRGRAKRSGSGATNFSLLKQAGDVEENPGPTSMDWIWRILFLVGAATGAHSFEQEVTQIPAALSVPEGENLVLNCSFTDSAIYNLQWFRQDPGKGLTSLLLIQSSQREQTSGRLNASLDKSSGRSTLYIAASQPGDSATYLCAVRPTSGGSYIPTFGRGTSLIVHPYTRIQNPDPAVYQLRDSKSSDKSVCLFTDFDSQTNVSQSKDSDVYITDKTVLDMRSMDFKSNSAVAWSNKSDFACANAFNNSIIPEDTFFPSPESSCGTTTPGERSSLPAFYPGTSGSCSGCGSLSLPLLAGLVAADAVASLLIVGAVFRSKRSRLLHSDYMNMTPRRPGPTRKHYQPYAPPRDFAAYRSLCARPRRSPAQEDGKVYINMPGRG

SEQ ID NO: 10501 - protein, 715 aa, -Artificial-Sequence
MALPVTALLLPLALLLHAARPEFNAGVTQTPKFQVLKTGQSMTLQCAQDMNHEYMSWYRQDPGMGLRLIHYSVAIQTTDQGEVPNGYNVSRSTIEDFPLRLLSAAPSQTSVYFCASSYLGNTGELFFGEGSRLTVLEDLKNVFPPEVAVFEPSEAEISHTQKATLVCLATGFYPDHVELSWWVNGKEVHSGVSTDPQPLKEQPALNDSRYCLSSRLRVSATFWQNPRNHFRCQVQFYGLSENDEWTQDRAKPVTQIVSAEAWGRADCGSTTPGERSSLPAFYPGTSGSCSGCGSLSLPLLAGLVAADAVASLLIVGAVFLCARPRRSPAQEDGKVYINMPGRGRAKRSGSGATNFSLLKQAGDVEENPGPTSMDWIWRILFLVGAATGAHSFEQEVTQIPAALSVPEGENLVLNCSFTDSAIYNLQWFRQDPGKGLTSLLLIQSSQREQTSGRLNASLDKSSGRSTLYIAASQPGDSATYLCAVRPTSGGSYIPTFGRGTSLIVHPYTRIQNPDPAVYQLRDSKSSDKSVCLFTDFDSQTNVSQSKDSDVYITDKTVLDMRSMDFKSNSAVAWSNKSDFACANAFNNSIIPEDTFFPSPESSCGTTTPGERSSLPAFYPGTSGSCSGCGSLSLPLLAGLVAADAVASLLIVGAVFRDQRLPPDAHKPPGGGSFRTPIQEEQADAHSTLAKILCARPRRSPAQEDGKVYINMPGRG

SEQ ID NO: 10502 - protein, 799 aa, -Artificial-Sequence
MALPVTALLLPLALLLHAARPEFNAGVTQTPKFQVLKTGQSMTLQCAQDMNHEYMSWYRQDPGMGLRLIHYSVAIQTTDQGEVPNGYNVSRSTIEDFPLRLLSAAPSQTSVYFCASSYLGNTGELFFGEGSRLTVLEDLKNVFPPEVAVFEPSEAEISHTQKATLVCLATGFYPDHVELSWWVNGKEVHSGVSTDPQPLKEQPALNDSRYCLSSRLRVSATFWQNPRNHFRCQVQFYGLSENDEWTQDRAKPVTQIVSAEAWGRADCGSTTPGERSSLPAFYPGTSGSCSGCGSLSLPLLAGLVAADAVASLLIVGAVFLCARPRRSPAQEDGKVYINMPGRGRAKRSGSGATNFSLLKQAGDVEENPGPTSMDWIWRILFLVGAATGAHSFEQEVTQIPAALSVPEGENLVLNCSFTDSAIYNLQWFRQDPGKGLTSLLLIQSSQREQTSGRLNASLDKSSGRSTLYIAASQPGDSATYLCAVRPTSGGSYIPTFGRGTSLIVHPYTRIQNPDPAVYQLRDSKSSDKSVCLFTDFDSQTNVSQSKDSDVYITDKTVLDMRSMDFKSNSAVAWSNKSDFACANAFNNSIIPEDTFFPSPESSCGTTTPGERSSLPAFYPGTSGSCSGCGSLSLPLLAGLVAADAVASLLIVGAVFWRRKRKEKQSETSPKEFLTIYEDVKDLKTRRNHEQEQTFPGGGSTIYSMIQSQSSAPTSQEPAYTLYSLIQPSRKSGSRKRNHSPSFNSTIYEVIGKSQPKAQNPARLSRKELENFDVYSLCARPRRSPAQEDGKVYINMPGRG

SEQ ID NO: 10503 - protein, 750 aa, -Artificial-Sequence
MALPVTALLLPLALLLHAARPEFNAGVTQTPKFQVLKTGQSMTLQCAQDMNHEYMSWYRQDPGMGLRLIHYSVAIQTTDQGEVPNGYNVSRSTIEDFPLRLLSAAPSQTSVYFCASSYLGNTGELFFGEGSRLTVLEDLKNVFPPEVAVFEPSEAEISHTQKATLVCLATGFYPDHVELSWWVNGKEVHSGVSTDPQPLKEQPALNDSRYCLSSRLRVSATFWQNPRNHFRCQVQFYGLSENDEWTQDRAKPVTQIVSAEAWGRADCGSLGEPQLCYILDAILFLYGIVLTLLYCKRGRKKLLYIFKQPFMRPVQTTQEEDGCSCRFPEEEEGGCELRLKIQVRKAAITSYEKSDGVYTGLSTRNQETYETLKHEKPPQRAKRSGSGATNFSLLKQAGDVEENPGPTSMDWIWRILFLVGAATGAHSFEQEVTQIPAALSVPEGENLVLNCSFTDSAIYNLQWFRQDPGKGLTSLLLIQSSQREQTSGRLNASLDKSSGRSTLYIAASQPGDSATYLCAVRPTSGGSYIPTFGRGTSLIVHPYTRIQNPDPAVYQLRDSKSSDKSVCLFTDFDSQTNVSQSKDSDVYITDKTVLDMRSMDFKSNSAVAWSNKSDFACANAFNNSIIPEDTFFPSPESSCGTLGEPQLCYILDAILFLYGIVLTLLYCRSKRSRLLHSDYMNMTPRRPGPTRKHYQPYAPPRDFAAYRSRLKIQVRKAAITSYEKSDGVYTGLSTRNQETYETLKHEKPPQ

SEQ ID NO: 10504 - protein, 745 aa, -Artificial-Sequence
MALPVTALLLPLALLLHAARPEFNAGVTQTPKFQVLKTGQSMTLQCAQDMNHEYMSWYRQDPGMGLRLIHYSVAIQTTDQGEVPNGYNVSRSTIEDFPLRLLSAAPSQTSVYFCASSYLGNTGELFFGEGSRLTVLEDLKNVFPPEVAVFEPSEAEISHTQKATLVCLATGFYPDHVELSWWVNGKEVHSGVSTDPQPLKEQPALNDSRYCLSSRLRVSATFWQNPRNHFRCQVQFYGLSENDEWTQDRAKPVTQIVSAEAWGRADCGSLGEPQLCYILDAILFLYGIVLTLLYCKRGRKKLLYIFKQPFMRPVQTTQEEDGCSCRFPEEEEGGCELRLKIQVRKAAITSYEKSDGVYTGLSTRNQETYETLKHEKPPQRAKRSGSGATNFSLLKQAGDVEENPGPTSMDWIWRILFLVGAATGAHSFEQEVTQIPAALSVPEGENLVLNCSFTDSAIYNLQWFRQDPGKGLTSLLLIQSSQREQTSGRLNASLDKSSGRSTLYIAASQPGDSATYLCAVRPTSGGSYIPTFGRGTSLIVHPYTRIQNPDPAVYQLRDSKSSDKSVCLFTDFDSQTNVSQSKDSDVYITDKTVLDMRSMDFKSNSAVAWSNKSDFACANAFNNSIIPEDTFFPSPESSCGTLGEPQLCYILDAILFLYGIVLTLLYCRDQRLPPDAHKPPGGGSFRTPIQEEQADAHSTLAKIRLKIQVRKAAITSYEKSDGVYTGLSTRNQETYETLKHEKPPQ

SEQ ID NO: 10505 - protein, 829 aa, -Artificial-Sequence
MALPVTALLLPLALLLHAARPEFNAGVTQTPKFQVLKTGQSMTLQCAQDMNHEYMSWYRQDPGMGLRLIHYSVAIQTTDQGEVPNGYNVSRSTIEDFPLRLLSAAPSQTSVYFCASSYLGNTGELFFGEGSRLTVLEDLKNVFPPEVAVFEPSEAEISHTQKATLVCLATGFYPDHVELSWWVNGKEVHSGVSTDPQPLKEQPALNDSRYCLSSRLRVSATFWQNPRNHFRCQVQFYGLSENDEWTQDRAKPVTQIVSAEAWGRADCGSLGEPQLCYILDAILFLYGIVLTLLYCKRGRKKLLYIFKQPFMRPVQTTQEEDGCSCRFPEEEEGGCELRLKIQVRKAAITSYEKSDGVYTGLSTRNQETYETLKHEKPPQRAKRSGSGATNFSLLKQAGDVEENPGPTSMDWIWRILFLVGAATGAHSFEQEVTQIPAALSVPEGENLVLNCSFTDSAIYNLQWFRQDPGKGLTSLLLIQSSQREQTSGRLNASLDKSSGRSTLYIAASQPGDSATYLCAVRPTSGGSYIPTFGRGTSLIVHPYTRIQNPDPAVYQLRDSKSSDKSVCLFTDFDSQTNVSQSKDSDVYITDKTVLDMRSMDFKSNSAVAWSNKSDFACANAFNNSIIPEDTFFPSPESSCGTLGEPQLCYILDAILFLYGIVLTLLYCWRRKRKEKQSETSPKEFLTIYEDVKDLKTRRNHEQEQTFPGGGSTIYSMIQSQSSAPTSQEPAYTLYSLIQPSRKSGSRKRNHSPSFNSTIYEVIGKSQPKAQNPARLSRKELENFDVYSRLKIQVRKAAITSYEKSDGVYTGLSTRNQETYETLKHEKPPQ

SEQ ID NO: 10506 - protein, 751 aa, -Artificial-Sequence
MALPVTALLLPLALLLHAARPEFNAGVTQTPKFQVLKTGQSMTLQCAQDMNHEYMSWYRQDPGMGLRLIHYSVAIQTTDQGEVPNGYNVSRSTIEDFPLRLLSAAPSQTSVYFCASSYLGNTGELFFGEGSRLTVLEDLKNVFPPEVAVFEPSEAEISHTQKATLVCLATGFYPDHVELSWWVNGKEVHSGVSTDPQPLKEQPALNDSRYCLSSRLRVSATFWQNPRNHFRCQVQFYGLSENDEWTQDRAKPVTQIVSAEAWGRADCGSLGEPQLCYILDAILFLYGIVLTLLYCKRGRKKLLYIFKQPFMRPVQTTQEEDGCSCRFPEEEEGGCELRLKIQVRKAAITSYEKSDGVYTGLSTRNQETYETLKHEKPPQRAKRSGSGATNFSLLKQAGDVEENPGPTSMDWIWRILFLVGAATGAHSFEQEVTQIPAALSVPEGENLVLNCSFTDSAIYNLQWFRQDPGKGLTSLLLIQSSQREQTSGRLNASLDKSSGRSTLYIAASQPGDSATYLCAVRPTSGGSYIPTFGRGTSLIVHPYTRIQNPDPAVYQLRDSKSSDKSVCLFTDFDSQTNVSQSKDSDVYITDKTVLDMRSMDFKSNSAVAWSNKSDFACANAFNNSIIPEDTFFPSPESSCGTLGEPQLCYILDAILFLYGIVLTLLYCKRGRKKLLYIFKQPFMRPVQTTQEEDGCSCRFPEEEEGGCELRLKIQVRKAAITSYEKSDGVYTGLSTRNQETYETLKHEKPPQ

SEQ ID NO: 10507 - protein, 750 aa, -Artificial-Sequence; identical to SEQ ID NO: 10503

SEQ ID NO: 10508 - protein, 749 aa, -Artificial-Sequence
MALPVTALLLPLALLLHAARPEFNAGVTQTPKFQVLKTGQSMTLQCAQDMNHEYMSWYRQDPGMGLRLIHYSVAIQTTDQGEVPNGYNVSRSTIEDFPLRLLSAAPSQTSVYFCASSYLGNTGELFFGEGSRLTVLEDLKNVFPPEVAVFEPSEAEISHTQKATLVCLATGFYPDHVELSWWVNGKEVHSGVSTDPQPLKEQPALNDSRYCLSSRLRVSATFWQNPRNHFRCQVQFYGLSENDEWTQDRAKPVTQIVSAEAWGRADCGSLGEPQLCYILDAILFLYGIVLTLLYCRSKRSRLLHSDYMNMTPRRPGPTRKHYQPYAPPRDFAAYRSRLKIQVRKAAITSYEKSDGVYTGLSTRNQETYETLKHEKPPQRAKRSGSGATNFSLLKQAGDVEENPGPTSMDWIWRILFLVGAATGAHSFEQEVTQIPAALSVPEGENLVLNCSFTDSAIYNLQWFRQDPGKGLTSLLLIQSSQREQTSGRLNASLDKSSGRSTLYIAASQPGDSATYLCAVRPTSGGSYIPTFGRGTSLIVHPYTRIQNPDPAVYQLRDSKSSDKSVCLFTDFDSQTNVSQSKDSDVYITDKTVLDMRSMDFKSNSAVAWSNKSDFACANAFNNSIIPEDTFFPSPESSCGTLGEPQLCYILDAILFLYGIVLTLLYCRSKRSRLLHSDYMNMTPRRPGPTRKHYQPYAPPRDFAAYRSRLKIQVRKAAITSYEKSDGVYTGLSTRNQETYETLKHEKPPQ

SEQ ID NO: 10509 - protein, 667 aa, -Artificial-Sequence
MALPVTALLLPLALLLHAARPEFNAGVTQTPKFQVLKTGQSMTLQCAQDMNHEYMSWYRQDPGMGLRLIHYSVAIQTTDQGEVPNGYNVSRSTIEDFPLRLLSAAPSQTSVYFCASSYLGNTGELFFGEGSRLTVLEDLKNVFPPEVAVFEPSEAEISHTQKATLVCLATGFYPDHVELSWWVNGKEVHSGVSTDPQPLKEQPALNDSRYCLSSRLRVSATFWQNPRNHFRCQVQFYGLSENDEWTQDRAKPVTQIVSAEAWGRADCGSLGEPQLSYILDAILFLYGIVLTLLYCRLKIQVRKAAITSYEKSDGVYTGLSTRNQETYETLKHEKPPQRAKRSGSGATNFSLLKQAGDVEENPGPTSMDWIWRILFLVGAATGAHSFEQEVTQIPAALSVPEGENLVLNCSFTDSAIYNLQWFRQDPGKGLTSLLLIQSSQREQTSGRLNASLDKSSGRSTLYIAASQPGDSATYLCAVRPTSGGSYIPTFGRGTSLIVHPYTRIQNPDPAVYQLRDSKSSDKSVCLFTDFDSQTNVSQSKDSDVYITDKTVLDMRSMDFKSNSAVAWSNKSDFACANAFNNSIIPEDTFFPSPESSCGTLGEPQLSYILDAILFLYGIVLTLLYCRLKIQVRKAAITSYEKSDGVYTGLSTRNQETYETLKHEKPPQ

SEQ ID NO: 10510 - protein, 703 aa, -Artificial-Sequence
MALPVTALLLPLALLLHAARPEFNAGVTQTPKFQVLKTGQSMTLQCAQDMNHEYMSWYRQDPGMGLRLIHYSVAIQTTDQGEVPNGYNVSRSTIEDFPLRLLSAAPSQTSVYFCASSYLGNTGELFFGEGSRLTVLEDLKNVFPPEVAVFEPSEAEISHTQKATLVCLATGFYPDHVELSWWVNGKEVHSGVSTDPQPLKEQPALNDSRYCLSSRLRVSATFWQNPRNHFRCQVQFYGLSENDEWTQDRAKPVTQIVSAEAWGRADCGSQAQSDCSCSTVSPGVLAGIVMGDLVLTVLIALAVYFLGRLVPRGRGAAEAATRKQRITETESPYQELQGQRSDVYSDLNTQRPYYKRAKRSGSGATNFSLLKQAGDVEENPGPTSMDWIWRILFLVGAATGAHSFEQEVTQIPAALSVPEGENLVLNCSFTDSAIYNLQWFRQDPGKGLTSLLLIQSSQREQTSGRLNASLDKSSGRSTLYIAASQPGDSATYLCAVRPTSGGSYIPTFGRGTSLIVHPYTRIQNPDPAVYQLRDSKSSDKSVCLFTDFDSQTNVSQSKDSDVYITDKTVLDMRSMDFKSNSAVAWSNKSDFACANAFNNSIIPEDTFFPSPESSCGTQAQSDCSSSTVSPGVLAGIVMGDLVLTVLIALAVYFLGRLVPRGRGAAEAATRKQRITETESPYQELQGQRSDVYSDLNTQRPYYK

SEQ ID NO: 10511 - protein, 745 aa, -Artificial-Sequence
MALPVTALLLPLALLLHAARPEFNAGVTQTPKFQVLKTGQSMTLQCAQDMNHEYMSWYRQDPGMGLRLIHYSVAIQTTDQGEVPNGYNVSRSTIEDFPLRLLSAAPSQTSVYFCASSYLGNTGELFFGEGSRLTVLEDLKNVFPPEVAVFEPSEAEISHTQKATLVCLATGFYPDHVELSWWVNGKEVHSGVSTDPQPLKEQPALNDSRYCLSSRLRVSATFWQNPRNHFRCQVQFYGLSENDEWTQDRAKPVTQIVSAEAWGRADCGSQAQSDCSCSTVSPGVLAGIVMGDLVLTVLIALAVYFLGRLVPRGRGAAEAATRKQRITETESPYQELQGQRSDVYSDLNTQRPYYKRAKRSGSGATNFSLLKQAGDVEENPGPTSMDWIWRILFLVGAATGAHSFEQEVTQIPAALSVPEGENLVLNCSFTDSAIYNLQWFRQDPGKGLTSLLLIQSSQREQTSGRLNASLDKSSGRSTLYIAASQPGDSATYLCAVRPTSGGSYIPTFGRGTSLIVHPYTRIQNPDPAVYQLRDSKSSDKSVCLFTDFDSQTNVSQSKDSDVYITDKTVLDMRSMDFKSNSAVAWSNKSDFACANAFNNSIIPEDTFFPSPESSCGTQAQSDCSCSTVSPGVLAGIVMGDLVLTVLIALAVYFLGRLVPRGRGAAEAATRKQRITETESPYQELQGQRSDVYSDLNTQKRGRKKLLYIFKQPFMRPVQTTQEEDGCSCRFPEEEEGGCELRPYYK

SEQ ID NO: 10512 - protein, 744 aa, -Artificial-Sequence
MALPVTALLLPLALLLHAARPEFNAGVTQTPKFQVLKTGQSMTLQCAQDMNHEYMSWYRQDPGMGLRLIHYSVAIQTTDQGEVPNGYNVSRSTIEDFPLRLLSAAPSQTSVYFCASSYLGNTGELFFGEGSRLTVLEDLKNVFPPEVAVFEPSEAEISHTQKATLVCLATGFYPDHVELSWWVNGKEVHSGVSTDPQPLKEQPALNDSRYCLSSRLRVSATFWQNPRNHFRCQVQFYGLSENDEWTQDRAKPVTQIVSAEAWGRADCGSQAQSDCSCSTVSPGVLAGIVMGDLVLTVLIALAVYFLGRLVPRGRGAAEAATRKQRITETESPYQELQGQRSDVYSDLNTQRPYYKRAKRSGSGATNFSLLKQAGDVEENPGPTSMDWIWRILFLVGAATGAHSFEQEVTQIPAALSVPEGENLVLNCSFTDSAIYNLQWFRQDPGKGLTSLLLIQSSQREQTSGRLNASLDKSSGRSTLYIAASQPGDSATYLCAVRPTSGGSYIPTFGRGTSLIVHPYTRIQNPDPAVYQLRDSKSSDKSVCLFTDFDSQTNVSQSKDSDVYITDKTVLDMRSMDFKSNSAVAWSNKSDFACANAFNNSIIPEDTFFPSPESSCGTQAQSDCSCSTVSPGVLAGIVMGDLVLTVLIALAVYFLGRLVPRGRGAAEAATRKQRITETESPYQELQGQRSDVYSDLNTQRSKRSRLLHSDYMNMTPRRPGPTRKHYQPYAPPRDFAAYRSRPYYK

SEQ ID NO: 10513 - protein, 739 aa, -Artificial-Sequence
MALPVTALLLPLALLLHAARPEFNAGVTQTPKFQVLKTGQSMTLQCAQDMNHEYMSWYRQDPGMGLRLIHYSVAIQTTDQGEVPNGYNVSRSTIEDFPLRLLSAAPSQTSVYFCASSYLGNTGELFFGEGSRLTVLEDLKNVFPPEVAVFEPSEAEISHTQKATLVCLATGFYPDHVELSWWVNGKEVHSGVSTDPQPLKEQPALNDSRYCLSSRLRVSATFWQNPRNHFRCQVQFYGLSENDEWTQDRAKPVTQIVSAEAWGRADCGSQAQSDCSCSTVSPGVLAGIVMGDLVLTVLIALAVYFLGRLVPRGRGAAEAATRKQRITETESPYQELQGQRSDVYSDLNTQRPYYKRAKRSGSGATNFSLLKQAGDVEENPGPTSMDWIWRILFLVGAATGAHSFEQEVTQIPAALSVPEGENLVLNCSFTDSAIYNLQWFRQDPGKGLTSLLLIQSSQREQTSGRLNASLDKSSGRSTLYIAASQPGDSATYLCAVRPTSGGSYIPTFGRGTSLIVHPYTRIQNPDPAVYQLRDSKSSDKSVCLFTDFDSQTNVSQSKDSDVYITDKTVLDMRSMDFKSNSAVAWSNKSDFACANAFNNSIIPEDTFFPSPESSCGTQAQSDCSCSTVSPGVLAGIVMGDLVLTVLIALAVYFLGRLVPRGRGAAEAATRKQRITETESPYQELQGQRSDVYSDLNTQRDQRLPPDAHKPPGGGSFRTPIQEEQADAHSTLAKIRPYYK

SEQ ID NO: 10514 - protein, 823 aa, -Artificial-Sequence
MALPVTALLLPLALLLHAARPEFNAGVTQTPKFQVLKTGQSMTLQCAQDMNHEYMSWYRQDPGMGLRLIHYSVAIQTTDQGEVPNGYNVSRSTIEDFPLRLLSAAPSQTSVYFCASSYLGNTGELFFGEGSRLTVLEDLKNVFPPEVAVFEPSEAEISHTQKATLVCLATGFYPDHVELSWWVNGKEVHSGVSTDPQPLKEQPALNDSRYCLSSRLRVSATFWQNPRNHFRCQVQFYGLSENDEWTQDRAKPVTQIVSAEAWGRADCGSQAQSDCSCSTVSPGVLAGIVMGDLVLTVLIALAVYFLGRLVPRGRGAAEAATRKQRITETESPYQELQGQRSDVYSDLNTQRPYYKRAKRSGSGATNFSLLKQAGDVEENPGPTSMDWIWRILFLVGAATGAHSFEQEVTQIPAALSVPEGENLVLNCSFTDSAIYNLQWFRQDPGKGLTSLLLIQSSQREQTSGRLNASLDKSSGRSTLYIAASQPGDSATYLCAVRPTSGGSYIPTFGRGTSLIVHPYTRIQNPDPAVYQLRDSKSSDKSVCLFTDFDSQTNVSQSKDSDVYITDKTVLDMRSMDFKSNSAVAWSNKSDFACANAFNNSIIPEDTFFPSPESSCGTQAQSDCSCSTVSPGVLAGIVMGDLVLTVLIALAVYFLGRLVPRGRGAAEAATRKQRITETESPYQELQGQRSDVYSDLNTQWRRKRKEKQSETSPKEFLTIYEDVKDLKTRRNHEQEQTFPGGGSTIYSMIQSQSSAPTSQEPAYTLYSLIQPSRKSGSRKRNHSPSFNSTIYEVIGKSQPKAQNPARLSRKELENFDVYSRPYYK

SEQ ID NO: 10515 - protein, 915 aa, -Artificial-Sequence
MALPVTALLLPLALLLHAARPEFNAGVTQTPKFQVLKTGQSMTLQCAQDMNHEYMSWYRQDPGMGLRLIHYSVAIQTTDQGEVPNGYNVSRSTIEDFPLRLLSAAPSQTSVYFCASSYLGNTGELFFGEGSRLTVLEDLKNVFPPEVAVFEPSEAEISHTQKATLVCLATGFYPDHVELSWWVNGKEVHSGVSTDPQPLKEQPALNDSRYCLSSRLRVSATFWQNPRNHFRCQVQFYGLSENDEWTQDRAKPVTQIVSAEAWGRADCGSQAQSDCSCSTVSPGVLAGIVMGDLVLTVLIALAVYFLGRLVPRGRGAAEAATRKQRITETESPYQELQGQRSDVYSDLNTQRVKFSRSADAPAYQQGQNQLYNELNLGRREEYDVLDKRRGRDPEMGGKPQRRKNPQEGLYNELQKDKMAEAYSEIGMKGERRRGKGHDGLYQGLSTATKDTYDALHMQALPPRRAKRSGSGATNFSLLKQAGDVEENPGPTSMDWIWRILFLVGAATGAHSFEQEVTQIPAALSVPEGENLVLNCSFTDSAIYNLQWFRQDPGKGLTSLLLIQSSQREQTSGRLNASLDKSSGRSTLYIAASQPGDSATYLCAVRPTSGGSYIPTFGRGTSLIVHPYTRIQNPDPAVYQLRDSKSSDKSVCLFTDFDSQTNVSQSKDSDVYITDKTVLDMRSMDFKSNSAVAWSNKSDFACANAFNNSIIPEDTFFPSPESSCGTTTPGERSSLPAFYPGTSGSCSGCGSLSLPLLAGLVAADAVASLLIVGAVFLCARPRRSPAQEDGKVYINMPGRGSSRRVKFSRSADAPAYQQGQNQLYNELNLGRREEYDVLDKRRGRDPEMGGKPQRRKNPQEGLYNELQKDKMAEAYSEIGMKGERRRGKGHDGLYQGLSTATKDTYDALHMQALPPR

SEQ ID NO: 10516 - protein, 841 aa, -Artificial-Sequence
MALPVTALLLPLALLLHAARPEFNAGVTQTPKFQVLKTGQSMTLQCAQDMNHEYMSWYRQDPGMGLRLIHYSVAIQTTDQGEVPNGYNVSRSTIEDFPLRLLSAAPSQTSVYFCASSYLGNTGELFFGEGSRLTVLEDLKNVFPPEVAVFEPSEAEISHTQKATLVCLATGFYPDHVELSWWVNGKEVHSGVSTDPQPLKEQPALNDSRYCLSSRLRVSATFWQNPRNHFRCQVQFYGLSENDEWTQDRAKPVTQIVSAEAWGRADCGSQAQSDCSCSTVSPGVLAGIVMGDLVLTVLIALAVYFLGRLVPRGRGAAEAATRKQRITETESPYQELQGQRSDVYSDLNTQRVKFSRSADAPAYQQGQNQLYNELNLGRREEYDVLDKRRGRDPEMGGKPQRRKNPQEGLYNELQKDKMAEAYSEIGMKGERRRGKGHDGLYQGLSTATKDTYDALHMQALPPRRAKRSGSGATNFSLLKQAGDVEENPGPTSMDWIWRILFLVGAATGAHSFEQEVTQIPAALSVPEGENLVLNCSFTDSAIYNLQWFRQDPGKGLTSLLLIQSSQREQTSGRLNASLDKSSGRSTLYIAASQPGDSATYLCAVRPTSGGSYIPTFGRGTSLIVHPYTRIQNPDPAVYQLRDSKSSDKSVCLFTDFDSQTNVSQSKDSDVYITDKTVLDMRSMDFKSNSAVAWSNKSDFACANAFNNSIIPEDTFFPSPESSCGTTTPGERSSLPAFYPGTSGSCSGCGSLSLPLLAGLVAADAVASLLIVGAVFKRGRKKLLYIFKQPFMRPVQTTQEEDGCSCRFPEEEEGGCELLCARPRRSPAQEDGKVYINMPGRG

SEQ ID NO: 10517 - protein, 840 aa, -Artificial-Sequence
MALPVTALLLPLALLLHAARPEFNAGVTQTPKFQVLKTGQSMTLQCAQDMNHEYMSWYRQDPGMGLRLIHYSVAIQTTDQGEVPNGYNVSRSTIEDFPLRLLSAAPSQTSVYFCASSYLGNTGELFFGEGSRLTVLEDLKNVFPPEVAVFEPSEAEISHTQKATLVCLATGFYPDHVELSWWVNGKEVHSGVSTDPQPLKEQPALNDSRYCLSSRLRVSATFWQNPRNHFRCQVQFYGLSENDEWTQDRAKPVTQIVSAEAWGRADCGSQAQSDCSCSTVSPGVLAGIVMGDLVLTVLIALAVYFLGRLVPRGRGAAEAATRKQRITETESPYQELQGQRSDVYSDLNTQRVKFSRSADAPAYQQGQNQLYNELNLGRREEYDVLDKRRGRDPEMGGKPQRRKNPQEGLYNELQKDKMAEAYSEIGMKGERRRGKGHDGLYQGLSTATKDTYDALHMQALPPRRAKRSGSGATNFSLLKQAGDVEENPGPTSMDWIWRILFLVGAATGAHSFEQEVTQIPAALSVPEGENLVLNCSFTDSAIYNLQWFRQDPGKGLTSLLLIQSSQREQTSGRLNASLDKSSGRSTLYIAASQPGDSATYLCAVRPTSGGSYIPTFGRGTSLIVHPYTRIQNPDPAVYQLRDSKSSDKSVCLFTDFDSQTNVSQSKDSDVYITDKTVLDMRSMDFKSNSAVAWSNKSDFACANAFNNSIIPEDTFFPSPESSCGTTTPGERSSLPAFYPGTSGSCSGCGSLSLPLLAGLVAADAVASLLIVGAVFRSKRSRLLHSDYMNMTPRRPGPTRKHYQPYAPPRDFAAYRSLCARPRRSPAQEDGKVYINMPGRG

SEQ ID NO: 10518 - protein, 1050 aa, -Artificial-Sequence
MALPVTALLLPLALLLHAARPEFNAGVTQTPKFQVLKTGQSMTLQCAQDMNHEYMSWYRQDPGMGLRLIHYSVAIQTTDQGEVPNGYNVSRSTIEDFPLRLLSAAPSQTSVYFCASSYLGNTGELFFGEGSRLTVLEDLKNVFPPEVAVFEPSEAEISHTQKATLVCLATGFYPDHVELSWWVNGKEVHSGVSTDPQPLKEQPALNDSRYCLSSRLRVSATFWQNPRNHFRCQVQFYGLSENDEWTQDRAKPVTQIVSAEAWGRADCGSQSFGLLDPKLCYLLDGILFIYGVILTALFLRVKFSRSADAPAYQQGQNQLYNELNLGRREEYDVLDKRRGRDPEMGGKPQRRKNPQEGLYNELQKDKMAEAYSEIGMKGERRRGKGHDGLYQGLSTATKDTYDALHMQALPPRRAKRSGSGATNFSLLKQAGDVEENPGPTSMDWIWRILFLVGAATGAHSFEQEVTQIPAALSVPEGENLVLNCSFTDSAIYNLQWFRQDPGKGLTSLLLIQSSQREQTSGRLNASLDKSSGRSTLYIAASQPGDSATYLCAVRPTSGGSYIPTFGRGTSLIVHPYTRIQNPDPAVYQLRDSKSSDKSVCLFTDFDSQTNVSQSKDSDVYITDKTVLDMRSMDFKSNSAVAWSNKSDFACANAFNNSIIPEDTFFPSPESSCGTQSFGLLDPKLCYLLDGILFIYGVILTALFLRVKFSRSADAPAYQQGQNQLYNELNLGRREEYDVLDKRRGRDPEMGGKPQRRKNPQEGLYNELQKDKMAEAYSEIGMKGERRRGKGHDGLYQGLSTATKDTYDALHMQALPPRRAKRSGSGVKQTLNFDLLKLAGDVESNPGPSRGHMTEYKPTVRLATRDDVPRAVRTLAAAFADYPATRHTVDPDRHIERVTELQELFLTRVGLDIGKVWVADDGAAVAVWTTPESVEAGAVFAEIGPRMAELSGSRLAAQQQMEGLLAPHRPKEPAWFLATVGVSPDHQGKGLGSAVVLPGVEAAERAGVPAFLETSAPRNLPFYERLGFTVTADVEVPEGPRTWCMTRKPGA

SEQ ID NO: 10519 - protein, 826 aa, -Artificial-Sequence
MALPVTALLLPLALLLHAARPEFNAGVTQTPKFQVLKTGQSMTLQCAQDMNHEYMSWYRQDPGMGLRLIHYSVAIQTTDQGEVPNGYNVSRSTIEDFPLRLLSAAPSQTSVYFCASSYLGNTGELFFGEGSRLTVLEDLKNVFPPEVAVFEPSEAEISHTQKATLVCLATGFYPDHVELSWWVNGKEVHSGVSTDPQPLKEQPALNDSRYCLSSRLRVSATFWQNPRNHFRCQVQFYGLSENDEWTQDRAKPVTQIVSAEAWGRADCGSQSFGLLDPKLCYLLDGILFIYGVILTALFLRVKFSRSADAPAYQQGQNQLYNELNLGRREEYDVLDKRRGRDPEMGGKPQRRKNPQEGLYNELQKDKMAEAYSEIGMKGERRRGKGHDGLYQGLSTATKDTYDALHMQALPPRRAKRSGSGATNFSLLKQAGDVEENPGPTSMDWIWRILFLVGAATGAHSFEQEVTQIPAALSVPEGENLVLNCSFTDSAIYNLQWFRQDPGKGLTSLLLIQSSQREQTSGRLNASLDKSSGRSTLYIAASQPGDSATYLCAVRPTSGGSYIPTFGRGTSLIVHPYTRASTKGPSVFPLAPSSKSTSGGTAALGCLVKDYFPEPVTVSWNSGALTSGVHTFPAVLQSSGLYSLSSVVTVPSSSLGTQTYICNVNHKPSNTKVDKRVEPKSCGTQSFGLLDPKLSYLLDGILFIYGVILTALFLRVKFSRSADAPAYQQGQNQLYNELNLGRREEYDVLDKRRGRDPEMGGKPQRRKNPQEGLYNELQKDKMAEAYSEIGMKGERRRGKGHDGLYQGLSTATKDTYDALHMQALPPR

SEQ ID NO: 10520 - protein, 826 aa, -Artificial-Sequence; identical to SEQ ID NO: 10519

SEQ ID NO: 10521 - protein, 826 aa, -Artificial-Sequence; identical to SEQ ID NO: 10519

SEQ ID NO: 10522 - protein, 817 aa, -Artificial-Sequence
MALPVTALLLPLALLLHAARPEFNAGVTQTPKFQVLKTGQSMTLQCAQDMNHEYMSWYRQDPGMGLRLIHYSVAIQTTDQGEVPNGYNVSRSTIEDFPLRLLSAAPSQTSVYFCASSYLGNTGELFFGEGSRLTVLEDLKNVFPPEVAVFEPSEAEISHTQKATLVCLATGFYPDHVELSWWVNGKEVHSGVSTDPQPLKEQPALNDSRYCLSSRLRVSATFWQNPRNHFRCQVQFYGLSENDEWTQDRAKPVTQIVSAEAWGRADCGSQSFGLLDPKLCYLLDGILFIYGVILTALFLRVKFSRSADAPAYQQGQNQLYNELNLGRREEYDVLDKRRGRDPEMGGKPQRRKNPQEGLYNELQKDKMAEAYSEIGMKGERRRGKGHDGLYQGLSTATKDTYDALHMQALPPRRAKRSGSGATNFSLLKQAGDVEENPGPTSMDWIWRILFLVGAATGAHSFEQEVTQIPAALSVPEGENLVLNCSFTDSAIYNLQWFRQDPGKGLTSLLLIQSSQREQTSGRLNASLDKSSGRSTLYIAASQPGDSATYLCAVRPTSGGSYIPTFGRGTSLIVHPYTRIQNPDPAVYQLRDSKSSDKSVCLFTDFDSQTNVSQSKDSDVYITDKTVLDMRSMDFKSNSAVAWSNKSDFACANAFNNSIIPEDTFFPSPESSCGTQSFGLLDPKLSYLLDGILFIYGVILTALFLRVKFSRSADAPAYQQGQNQLYNELNLGRREEYDVLDKRRGRDPEMGGKPQRRKNPQEGLYNELQKDKMAEAYSEIGMKGERRRGKGHDGLYQGLSTATKDTYDALHMQALPPR

SEQ ID NO: 10523 - protein, 951 aa, -Artificial-Sequence
MALPVTALLLPLALLLHAARPEFNAGVTQTPKFQVLKTGQSMTLQCAQDMNHEYMSWYRQDPGMGLRLIHYSVAIQTTDQGEVPNGYNVSRSTIEDFPLRLLSAAPSQTSVYFCASSYLGNTGELFFGEGSRLTVLEGQPKANPTVTLFPPSSEELQANKATLVCLISDFYPGAVTVAWKADGSPVKAGVETTKPSKQSNNKYAASSYLSLTPEQWKSHRSYSCQVTHEGSTVEKTVAPTECSGSLGEPQLCYILDAILFLYGIVLTLLYCRLKIQVRKAAITSYEKSDGVYTGLSTRNQETYETLKHEKPPQRAKRSGSGATNFSLLKQAGDVEENPGPTSMDWIWRILFLVGAATGAHSFEQEVTQIPAALSVPEGENLVLNCSFTDSAIYNLQWFRQDPGKGLTSLLLIQSSQREQTSGRLNASLDKSSGRSTLYIAASQPGDSATYLCAVRPTSGGSYIPTFGRGTSLIVHPYTRIQNPDPAVYQLRDSKSSDKSVCLFTDFDSQTNVSQSKDSDVYITDKTVLDMRSMDFKSNSAVAWSNKSDFACANAFNNSIIPEDTFFPSPESSCGTQSFGLLDPKLCYLLDGILFIYGVILTALFLRVKFSRSADAPAYQQGQNQLYNELNLGRREEYDVLDKRRGRDPEMGGKPQRRKNPQEGLYNELQKDKMAEAYSEIGMKGERRRGKGHDGLYQGLSTATKDTYDALHMQALPPRRAKRSGSGVKQTLNFDLLKLAGDVESNPGPSRGHMTEYKPTVRLATRDDVPRAVRTLAAAFADYPATRHTVDPDRHIERVTELQELFLTRVGLDIGKVWVADDGAAVAVWTTPESVEAGAVFAEIGPRMAELSGSRLAAQQQMEGLLAPHRPKEPAWFLATVGVSPDHQGKGLGSAVVLPGVEAAERAGVPAFLETSAPRNLPFYERLGFTVTADVEVPEGPRTWCMTRKPGA

SEQ ID NO: 10524 - protein, 751 aa, -Artificial-Sequence
MALPVTALLLPLALLLHAARPEFNAGVTQTPKFQVLKTGQSMTLQCAQDMNHEYMSWYRQDPGMGLRLIHYSVAIQTTDQGEVPNGYNVSRSTIEDFPLRLLSAAPSQTSVYFCASSYLGNTGELFFGEGSRLTVLEDLKNVFPPEVAVFEPSEAEISHTQKATLVCLATGFYPDHVELSWWVNGKEVHSGVSTDPQPLKEQPALNDSRYCLSSRLRVSATFWQNPRNHFRCQVQFYGLSENDEWTQDRAKPVTQIVSAEAWGRADCGSQSFGLLDPKLCYLLDGILFIYGVILTALFLRVKFSRSADAPAYQQGQNQLYNELNLGRREEYDVLDKRRGRDPEMGGKPQRRKNPQEGLYNELQKDKMAEAYSEIGMKGERRRGKGHDGLYQGLSTATKDTYDALHMQALPPRRAKRSGSGATNFSLLKQAGDVEENPGPTSMDWIWRILFLVGAATGAHSFEQEVTQIPAALSVPEGENLVLNCSFTDSAIYNLQWFRQDPGKGLTSLLLIQSSQREQTSGRLNASLDKSSGRSTLYIAASQPGDSATYLCAVRPTSGGSYIPTFGRGTSLIVHPYTRASTKGPSVFPLAPSSKSTSGGTAALGCLVKDYFPEPVTVSWNSGALTSGVHTFPAVLQSSGLYSLSSVVTVPSSSLGTQTYICNVNHKPSNTKVDKRVEPKSCGTLGEPQLCYILDAILFLYGIVLTLLYCRLKIQVRKAAITSYEKSDGVYTGLSTRNQETYETLKHEKPPQ

SEQ ID NO: 10525 - protein, 751 aa, -Artificial-Sequence; identical to SEQ ID NO: 10524

SEQ ID NO: 10526 - protein, 742 aa, -Artificial-Sequence
MALPVTALLLPLALLLHAARPEFNAGVTQTPKFQVLKTGQSMTLQCAQDMNHEYMSWYRQDPGMGLRLIHYSVAIQTTDQGEVPNGYNVSRSTIEDFPLRLLSAAPSQTSVYFCASSYLGNTGELFFGEGSRLTVLEDLKNVFPPEVAVFEPSEAEISHTQKATLVCLATGFYPDHVELSWWVNGKEVHSGVSTDPQPLKEQPALNDSRYCLSSRLRVSATFWQNPRNHFRCQVQFYGLSENDEWTQDRAKPVTQIVSAEAWGRADCGSQSFGLLDPKLCYLLDGILFIYGVILTALFLRVKFSRSADAPAYQQGQNQLYNELNLGRREEYDVLDKRRGRDPEMGGKPQRRKNPQEGLYNELQKDKMAEAYSEIGMKGERRRGKGHDGLYQGLSTATKDTYDALHMQALPPRRAKRSGSGATNFSLLKQAGDVEENPGPTSMDWIWRILFLVGAATGAHSFEQEVTQIPAALSVPEGENLVLNCSFTDSAIYNLQWFRQDPGKGLTSLLLIQSSQREQTSGRLNASLDKSSGRSTLYIAASQPGDSATYLCAVRPTSGGSYIPTFGRGTSLIVHPYTRIQNPDPAVYQLRDSKSSDKSVCLFTDFDSQTNVSQSKDSDVYITDKTVLDMRSMDFKSNSAVAWSNKSDFACANAFNNSIIPEDTFFPSPESSCGTLGEPQLCYILDAILFLYGIVLTLLYCRLKIQVRKAAITSYEKSDGVYTGLSTRNQETYETLKHEKPPQ

SEQ ID NO: 10527 - protein, 955 aa, -Artificial-Sequence
MALPVTALLLPLALLLHAARPEFNAGVTQTPKFQVLKTGQSMTLQCAQDMNHEYMSWYRQDPGMGLRLIHYSVAIQTTDQGEVPNGYNVSRSTIEDFPLRLLSAAPSQTSVYFCASSYLGNTGELFFGEGSRLTVLEGQPKANPTVTLFPPSSEELQANKATLVCLISDFYPGAVTVAWKADGSPVKAGVETTKPSKQSNNKYAASSYLSLTPEQWKSHRSYSCQVTHEGSTVEKTVAPTECSTTPGERSSLPAFYPGTSGSCSGCGSLSLPLLAGLVAADAVASLLIVGAVFLCARPRRSPAQEDGKVYINMPGRGRAKRSGSGATNFSLLKQAGDVEENPGPTSMDWIWRILFLVGAATGAHSFEQEVTQIPAALSVPEGENLVLNCSFTDSAIYNLQWFRQDPGKGLTSLLLIQSSQREQTSGRLNASLDKSSGRSTLYIAASQPGDSATYLCAVRPTSGGSYIPTFGRGTSLIVHPYTRIQNPDPAVYQLRDSKSSDKSVCLFTDFDSQTNVSQSKDSDVYITDKTVLDMRSMDFKSNSAVAWSNKSDFACANAFNNSIIPEDTFFPSPESSCGTQSFGLLDPKLCYLLDGILFIYGVILTALFLRVKFSRSADAPAYQQGQNQLYNELNLGRREEYDVLDKRRGRDPEMGGKPQRRKNPQEGLYNELQKDKMAEAYSEIGMKGERRRGKGHDGLYQGLSTATKDTYDALHMQALPPRRAKRSGSGVKQTLNFDLLKLAGDVESNPGPSRGHMTEYKPTVRLATRDDVPRAVRTLAAAFADYPATRHTVDPDRHIERVTELQELFLTRVGLDIGKVWVADDGAAVAVWTTPESVEAGAVFAEIGPRMAELSGSRLAAQQQMEGLLAPHRPKEPAWFLATVGVSPDHQGKGLGSAVVLPGVEAAERAGVPAFLETSAPRNLPFYERLGFTVTADVEVPEGPRTWCMTRKPGA

SEQ ID NO: 10528 - protein, 988 aa, -Artificial-Sequence
MALPVTALLLPLALLLHAARPEFNAGVTQTPKFQVLKTGQSMTLQCAQDMNHEYMSWYRQDPGMGLRLIHYSVAIQTTDQGEVPNGYNVSRSTIEDFPLRLLSAAPSQTSVYFCASSYLGNTGELFFGEGSRLTVLEDLKNVFPPEVAVFEPSEAEISHTQKATLVCLATGFYPDHVELSWWVNGKEVHSGVSTDPQPLKEQPALNDSRYCLSSRLRVSATFWQNPRNHFRCQVQFYGLSENDEWTQDRAKPVTQIVSAEAWGRADCGSQSFGLLDPKLCYLLDGILFIYGVILTALFLRVKFSRSADAPAYQQGQNQLYNELNLGRREEYDVLDKRRGRDPEMGGKPQRRKNPQEGLYNELQKDKMAEAYSEIGMKGERRRGKGHDGLYQGLSTATKDTYDALHMQALPPRRAKRSGSGATNFSLLKQAGDVEENPGPTSMDWIWRILFLVGAATGAHSFEQEVTQIPAALSVPEGENLVLNCSFTDSAIYNLQWFRQDPGKGLTSLLLIQSSQREQTSGRLNASLDKSSGRSTLYIAASQPGDSATYLCAVRPTSGGSYIPTFGRGTSLIVHPYTRASTKGPSVFPLAPSSKSTSGGTAALGCLVKDYFPEPVTVSWNSGALTSGVHTFPAVLQSSGLYSLSSVVTVPSSSLGTQTYICNVNHKPSNTKVDKRVEPKSCTTPGERSSLPAFYPGTSGSCSGCGSLSLPLLAGLVAADAVASLLIVGAVFLCARPRRSPAQEDGKVYINMPGRGRAKRSGSGVKQTLNFDLLKLAGDVESNPGPSRGHMTEYKPTVRLATRDDVPRAVRTLAAAFADYPATRHTVDPDRHIERVTELQELFLTRVGLDIGKVWVADDGAAVAVWTTPESVEAGAVFAEIGPRMAELSGSRLAAQQQMEGLLAPHRPKEPAWFLATVGVSPDHQGKGLGSAVVLPGVEAAERAGVPAFLETSAPRNLPFYERLGFTVTADVEVPEGPRTWCMTRKPGA

SEQ ID NO: 10529 - protein, 988 aa, -Artificial-Sequence; identical to SEQ ID NO: 10528

SEQ ID NO: 10530 - protein, 1095 aa, -Artificial-Sequence
MALPVTALLLPLALLLHAARPEFNAGVTQTPKFQVLKTGQSMTLQCAQDMNHEYMSWYRQDPGMGLRLIHYSVAIQTTDQGEVPNGYNVSRSTIEDFPLRLLSAAPSQTSVYFCASSYLGNTGELFFGEGSRLTVLEDLKNVFPPEVAVFEPSEAEISHTQKATLVCLATGFYPDHVELSWWVNGKEVHSGVSTDPQPLKEQPALNDSRYCLSSRLRVSATFWQNPRNHFRCQVQFYGLSENDEWTQDRAKPVTQIVSAEAWGRADCGSTTPGERSSLPAFYPGTSGSCSGCGSLSLPLLAGLVAADAVASLLIVGAVFLCARPRRSPAQEDGKVYINMPGRGSTSRVKFSRSADAPAYQQGQNQLYNELNLGRREEYDVLDKRRGRDPEMGGKPQRRKNPQEGLYNELQKDKMAEAYSEIGMKGERRRGKGHDGLYQGLSTATKDTYDALHMQALPPRRAKRSGSGATNFSLLKQAGDVEENPGPMDWIWRILFLVGAATGAHSFEQEVTQIPAALSVPEGENLVLNCSFTDSAIYNLQWFRQDPGKGLTSLLLIQSSQREQTSGRLNASLDKSSGRSTLYIAASQPGDSATYLCAVRPTSGGSYIPTFGRGTSLIVHPYTRIQNPDPAVYQLRDSKSSDKSVCLFTDFDSQTNVSQSKDSDVYITDKTVLDMRSMDFKSNSAVAWSNKSDFACANAFNNSIIPEDTFFPSPESSCGTQSFGLLDPKLCYLLDGILFIYGVILTALFLRVKFSRSADAPAYQQGQNQLYNELNLGRREEYDVLDKRRGRDPEMGGKPQRRKNPQEGLYNELQKDKMAEAYSEIGMKGERRRGKGHDGLYQGLSTATKDTYDALHMQALPPRRAKRSGSGVKQTLNFDLLKLAGDVESNPGPSRGHMTEYKPTVRLATRDDVPRAVRTLAAAFADYPATRHTVDPDRHIERVTELQELFLTRVGLDIGKVWVADDGAAVAVWTTPESVEAGAVFAEIGPRMAELSGSRLAAQQQMEGLLAPHRPKEPAWFLATVGVSPDHQGKGLGSAVVLPGVEAAERAGVPAFLETSAPRNLPFYERLGFTVTADVEVPEGPRTWCMTRKPGA

SEQ ID NO: 10531 - protein, 989 aa, -Artificial-Sequence
MALPVTALLLPLALLLHAARPAIQTTDQGEVPNGYNVSRSTIEDFPKKREHFSLILDSAKTNQTSVYFCASSSTNTEVFFGKGTRLTVLLEGQPKANPTVTLFPPSSEELQANKATLVCLISDFYPGAVTVAWKADGSPVKAGVETTKPSKQSNNKYAASSYLSLTPEQWKSHRSYSCQVTHEGSTVEKTVAPTECSGSQSFGLLDPKLCYLLDGILFIYGVILTALFLRVKFSRSADAPAYQQGQNQLYNELNLGRREEYDVLDKRRGRDPEMGGKPQRRKNPQEGLYNELQKDKMAEAYSEIGMKGERRRGKGHDGLYQGLSTATKDTYDALHMQALPPRRAKRSGSGATNFSLLKQAGDVEENPGPTSMDWIWRILFLVGAATGAHSFEDGDSVTQTEGLVTLTEGLPVMLNCTYQTIYSNPFLFWYVQHLNESPRLLLKSFTDNKRTEHQGFHATLHKSSSSFHLQKSSAQLSDSALYYCAFDTNTYKVIFGKGTHLHVLPNTRASTKGPSVFPLAPSSKSTSGGTAALGCLVKDYFPEPVTVSWNSGALTSGVHTFPAVLQSSGLYSLSSVVTVPSSSLGTQTYICNVNHKPSNTKVDKRVEPKSCGTQSFGLLDPKLCYLLDGILFIYGVILTALFLRVKFSRSADAPAYQQGQNQLYNELNLGRREEYDVLDKRRGRDPEMGGKPQRRKNPQEGLYNELQKDKMAEAYSEIGMKGERRRGKGHDGLYQGLSTATKDTYDALHMQALPPRRAKRSGSGVKQTLNFDLLKLAGDVESNPGPSRGHMTEYKPTVRLATRDDVPRAVRTLAAAFADYPATRHTVDPDRHIERVTELQELFLTRVGLDIGKVWVADDGAAVAVWTTPESVEAGAVFAEIGPRMAELSGSRLAAQQQMEGLLAPHRPKEPAWFLATVGVSPDHQGKGLGSAVVLPGVEAAERAGVPAFLETSAPRNLPFYERLGFTVTADVEVPEGPRTWCMTRKPGA

SEQ ID NO: 10532 - protein, 1007 aa, -Artificial-Sequence
MALPVTALLLPLALLLHAARPAIQTTDQGEVPNGYNVSRSTIEDFPKKREHFSLILDSAKTNQTSVYFCASSSTNTEVFFGKGTRLTVLLEGQPKANPTVTLFPPSSEELQANKATLVCLISDFYPGAVTVAWKADGSPVKAGVETTKPSKQSNNKYAASSYLSLTPEQWKSHRSYSCQVTHEGSTVEKTVAPTECSGSQSFGLLDPKLCYLLDGILFIYGVILTALFLRVKFSRSADAPAYQQGQNQLYNELNLGRREEYDVLDKRRGRDPEMGGKPQRRKNPQEGLYNELQKDKMAEAYSEIGMKGERRRGKGHDGLYQGLSTATKDTYDALHMQALPPRRAKRSGSGATNFSLLKQAGDVEENPGPTSMDWIWRILFLVGAATGAHSFEDGDSVTQTEGLVTLTEGLPVMLNCTYQTIYSNPFLFWYVQHLNESPRLLLKSFTDNKRTEHQGFHATLHKSSSSFHLQKSSAQLSDSALYYCAFDTNTYKVIFGKGTHLHVLPNTRASPTSPKVFPLSLCSTQPDGNVVIACLVQGFFPQEPLSVTWSESGQGVTARNFPPSQDASGDLYTTSSQLTLPATQCLAGKSVTCHVKHYTNPSQDVTVPCPVPSTPPTPSPSTPPTPSPSGTQSFGLLDPKLCYLLDGILFIYGVILTALFLRVKFSRSADAPAYQQGQNQLYNELNLGRREEYDVLDKRRGRDPEMGGKPQRRKNPQEGLYNELQKDKMAEAYSEIGMKGERRRGKGHDGLYQGLSTATKDTYDALHMQALPPRRAKRSGSGVKQTLNFDLLKLAGDVESNPGPSRGHMTEYKPTVRLATRDDVPRAVRTLAAAFADYPATRHTVDPDRHIERVTELQELFLTRVGLDIGKVWVADDGAAVAVWTTPESVEAGAVFAEIGPRMAELSGSRLAAQQQMEGLLAPHRPKEPAWFLATVGVSPDHQGKGLGSAVVLPGVEAAERAGVPAFLETSAPRNLPFYERLGFTVTADVEVPEGPRTWCMTRKPGA

SEQ ID NO: 10533 - protein, 993 aa, -Artificial-Sequence
ASTMALPVTALLLPLALLLHAARPAIQTTDQGEVPNGYNVSRSTIEDFPKKREHFSLILDSAKTNQTSVYFCASSSTNTEVFFGKGTRLTVLLEGQPKANPTVTLFPPSSEELQANKATLVCLISDFYPGAVTVAWKADGSPVKAGVETTKPSKQSNNKYAASSYLSLTPEQWKSHRSYSCQVTHEGSTVEKTVAPTECSGSQSFGLLDPKLCYLLDGILFIYGVILTALFLRVKFSRSADAPAYQQGQNQLYNELNLGRREEYDVLDKRRGRDPEMGGKPQRRKNPQEGLYNELQKDKMAEAYSEIGMKGERRRGKGHDGLYQGLSTATKDTYDALHMQALPPRRAKRSGSGATNFSLLKQAGDVEENPGPTSMDWIWRILFLVGAATGAHSFEDGDSVTQTEGLVTLTEGLPVMLNCTYQTIYSNPFLFWYVQHLNESPRLLLKSFTDNKRTEHQGFHATLHKSSSSFHLQKSSAQLSDSALYYCAFDTNTYKVIFGKGTHLHVLPNTRASTKGPSVFPLAPCSRSTSESTAALGCLVKDYFPEPVTVSWNSGALTSGVHTFPAVLQSSGLYSLSSVVTVPSSNFGTQTYTCNVDHKPSNTKVDKTVERKCGTQSFGLLDPKLCYLLDGILFIYGVILTALFLRVKFSRSADAPAYQQGQNQLYNELNLGRREEYDVLDKRRGRDPEMGGKPQRRKNPQEGLYNELQKDKMAEAYSEIGMKGERRRGKGHDGLYQGLSTATKDTYDALHMQALPPRRAKRSGSGVKQTLNFDLLKLAGDVESNPGPSRGHMTEYKPTVRLATRDDVPRAVRTLAAAFADYPATRHTVDPDRHIERVTELQELFLTRVGLDIGKVWVADDGAAVAVWTTPESVEAGAVFAEIGPRMAELSGSRLAAQQQMEGLLAPHRPKEPAWFLATVGVSPDHQGKGLGSAVVLPGVEAAERAGVPAFLETSAPRNLPFYERLGFTVTADVEVPEGPRTWCMTRKPGAVD

SEQ ID NO: 10534 - protein, 1090 aa, -Artificial-Sequence
MALPVTALLLPLALLLHAARPLVDMKVTQMPRYLIKRMGENVLLECGQDMSHETMYWYRQDPGLGLQLIYISYDVDSNSEGDIPKGYRVSRKKREHFSLILDSAKTNQTSVYFCASSSTNTEVFFGKGTRLTVLLEGQPKANPTVTLFPPSSEELQANKATLVCLISDFYPGAVTVAWKADGSPVKAGVETTKPSKQSNNKYAASSYLSLTPEQWKSHRSYSCQVTHEGSTVEKTVAPTECSGSQSFGLLDPKLCYLLDGILFIYGVILTALFLRVKFSRSADAPAYQQGQNQLYNELNLGRREEYDVLDKRRGRDPEMGGKPQRRKNPQEGLYNELQKDKMAEAYSEIGMKGERRRGKGHDGLYQGLSTATKDTYDALHMQALPPRRAKRSGSGATNFSLLKQAGDVEENPGPTSMDWIWRILFLVGAATGAHSFEDGDSVTQTEGLVTLTEGLPVMLNCTYQTIYSNPFLFWYVQHLNESPRLLLKSFTDNKRTEHQGFHATLHKSSSSFHLQKSSAQLSDSALYYCAFDTNTYKVIFGKGTHLHVLPNTRAPTKAPDVFPIISGCRHPKDNSPVVLACLITGYHPTSVTVTWYMGTQSQPQRTFPEIQRRDSYYMTSSQLSTPLQQWRQGEYKCVVQHTASKSKKEIFRWPESPKAQASSVPTAQPQAEGSLAKATTAPATTRNTGRGGEEKKKEKEKEEQEERETKTPGTQSFGLLDPKLCYLLDGILFIYGVILTALFLRVKFSRSADAPAYQQGQNQLYNELNLGRREEYDVLDKRRGRDPEMGGKPQRRKNPQEGLYNELQKDKMAEAYSEIGMKGERRRGKGHDGLYQGLSTATKDTYDALHMQALPPRRAKRSGSGVKQTLNFDLLKLAGDVESNPGPSRGHMTEYKPTVRLATRDDVPRAVRTLAAAFADYPATRHTVDPDRHIERVTELQELFLTRVGLDIGKVWVADDGAAVAVWTTPESVEAGAVFAEIGPRMAELSGSRLAAQQQMEGLLAPHRPKEPAWFLATVGVSPDHQGKGLGSAVVLPGVEAAERAGVPAFLETSAPRNLPFYERLGFTVTADVEVPEGPRTWCMTRKPGA

SEQ ID NO: 10535 - protein, 1032 aa, -Artificial-Sequence
MALPVTALLLPLALLLHAARPLVDMKVTQMPRYLIKRMGENVLLECGQDMSHETMYWYRQDPGLGLQLIYISYDVDSNSEGDIPKGYRVSRKKREHFSLILDSAKTNQTSVYFCASSSTNTEVFFGKGTRLTVLLEGQPKANPTVTLFPPSSEELQANKATLVCLISDFYPGAVTVAWKADGSPVKAGVETTKPSKQSNNKYAASSYLSLTPEQWKSHRSYSCQVTHEGSTVEKTVAPTECSGSQSFGLLDPKLCYLLDGILFIYGVILTALFLRVKFSRSADAPAYQQGQNQLYNELNLGRREEYDVLDKRRGRDPEMGGKPQRRKNPQEGLYNELQKDKMAEAYSEIGMKGERRRGKGHDGLYQGLSTATKDTYDALHMQALPPRRAKRSGSGATNFSLLKQAGDVEENPGPTSMDWIWRILFLVGAATGAHSFEDGDSVTQTEGLVTLTEGLPVMLNCTYQTIYSNPFLFWYVQHLNESPRLLLKSFTDNKRTEHQGFHATLHKSSSSFHLQKSSAQLSDSALYYCAFDTNTYKVIFGKGTHLHVLPNTRASTKGPSVFPLAPCSRSTSESTAALGCLVKDYFPEPVTVSWNSGALTSGVHTFPAVLQSSGLYSLSSVVTVPSSNFGTQTYTCNVDHKPSNTKVDKTVERKGTQSFGLLDPKLCYLLDGILFIYGVILTALFLRVKFSRSADAPAYQQGQNQLYNELNLGRREEYDVLDKRRGRDPEMGGKPQRRKNPQEGLYNELQKDKMAEAYSEIGMKGERRRGKGHDGLYQGLSTATKDTYDALHMQALPPRRAKRSGSGVKQTLNFDLLKLAGDVESNPGPSRGHMTEYKPTVRLATRDDVPRAVRTLAAAFADYPATRHTVDPDRHIERVTELQELFLTRVGLDIGKVWVADDGAAVAVWTTPESVEAGAVFAEIGPRMAELSGSRLAAQQQMEGLLAPHRPKEPAWFLATVGVSPDHQGKGLGSAVVLPGVEAAERAGVPAFLETSAPRNLPFYERLGFTVTADVEVPEGPRTWCMTRKPGA

SEQ ID NO: 10536 - protein, 1041 aa, -Artificial-Sequence
MALPVTALLLPLALLLHAARPLVDMKVTQMPRYLIKRMGENVLLECGQDMSHETMYWYRQDPGLGLQLIYISYDVDSNSEGDIPKGYRVSRKKREHFSLILDSAKTNQTSVYFCASSSTNTEVFFGKGTRLTVLLEGQPKANPTVTLFPPSSEELQANKATLVCLISDFYPGAVTVAWKADGSPVKAGVETTKPSKQSNNKYAASSYLSLTPEQWKSHRSYSCQVTHEGSTVEKTVAPTECSGSQSFGLLDPKLCYLLDGILFIYGVILTALFLRVKFSRSADAPAYQQGQNQLYNELNLGRREEYDVLDKRRGRDPEMGGKPQRRKNPQEGLYNELQKDKMAEAYSEIGMKGERRRGKGHDGLYQGLSTATKDTYDALHMQALPPRRAKRSGSGATNFSLLKQAGDVEENPGPTSMDWIWRILFLVGAATGAHSFEDGDSVTQTEGLVTLTEGLPVMLNCTYQTIYSNPFLFWYVQHLNESPRLLLKSFTDNKRTEHQGFHATLHKSSSSFHLQKSSAQLSDSALYYCAFDTNTYKVIFGKGTHLHVLPNTRASPTSPKVFPLSLDSTPQDGNVVVACLVQGFFPQEPLSVTWSESGQNVTARNFPPSQDASGDLYTTSSQLTLPATQCPDGKSVTCHVKHYTNPSQDVTVPCPVPPPPPGTQSFGLLDPKLCYLLDGILFIYGVILTALFLRVKFSRSADAPAYQQGQNQLYNELNLGRREEYDVLDKRRGRDPEMGGKPQRRKNPQEGLYNELQKDKMAEAYSEIGMKGERRRGKGHDGLYQGLSTATKDTYDALHMQALPPRRAKRSGSGVKQTLNFDLLKLAGDVESNPGPSRGHMTEYKPTVRLATRDDVPRAVRTLAAAFADYPATRHTVDPDRHIERVTELQELFLTRVGLDIGKVWVADDGAAVAVWTTPESVEAGAVFAEIGPRMAELSGSRLAAQQQMEGLLAPHRPKEPAWFLATVGVSPDHQGKGLGSAVVLPGVEAAERAGVPAFLETSAPRNLPFYERLGFTVTADVEVPEGPRTWCMTRKPGAVD

SEQ ID NO: 10537 - protein, 1034 aa, -Artificial-Sequence
MALPVTALLLPLALLLHAARPLVDMKVTQMPRYLIKRMGENVLLECGQDMSHETMYWYRQDPGLGLQLIYISYDVDSNSEGDIPKGYRVSRKKREHFSLILDSAKTNQTSVYFCASSSTNTEVFFGKGTRLTVLLEGQPKANPTVTLFPPSSEELQANKATLVCLISDFYPGAVTVAWKADGSPVKAGVETTKPSKQSNNKYAASSYLSLTPEQWKSHRSYSCQVTHEGSTVEKTVAPTECSGSQSFGLLDPKLCYLLDGILFIYGVILTALFLRVKFSRSADAPAYQQGQNQLYNELNLGRREEYDVLDKRRGRDPEMGGKPQRRKNPQEGLYNELQKDKMAEAYSEIGMKGERRRGKGHDGLYQGLSTATKDTYDALHMQALPPRRAKRSGSGATNFSLLKQAGDVEENPGPTSMDWIWRILFLVGAATGAHSFEDGDSVTQTEGLVTLTEGLPVMLNCTYQTIYSNPFLFWYVQHLNESPRLLLKSFTDNKRTEHQGFHATLHKSSSSFHLQKSSAQLSDSALYYCAFDTNTYKVIFGKGTHLHVLPNTRASTQSPSVFPLTRCCKNIPSNATSVTLGCLATGYFPEPVMVTWDTGSLNGTTMTLPATTLTLSGHYATISLLTVSGAWAKQMFTCRVAHTPSSTDWVDNKTFSGTQSFGLLDPKLCYLLDGILFIYGVILTALFLRVKFSRSADAPAYQQGQNQLYNELNLGRREEYDVLDKRRGRDPEMGGKPQRRKNPQEGLYNELQKDKMAEAYSEIGMKGERRRGKGHDGLYQGLSTATKDTYDALHMQALPPRRAKRSGSGVKQTLNFDLLKLAGDVESNPGPSRGHMTEYKPTVRLATRDDVPRAVRTLAAAFADYPATRHTVDPDRHIERVTELQELFLTRVGLDIGKVWVADDGAAVAVWTTPESVEAGAVFAEIGPRMAELSGSRLAAQQQMEGLLAPHRPKEPAWFLATVGVSPDHQGKGLGSAVVLPGVEAAERAGVPAFLETSAPRNLPFYERLGFTVTADVEVPEGPRTWCMTRKPGA

SEQ ID NO: 10538 - protein, 1034 aa, -Artificial-Sequence
MALPVTALLLPLALLLHAARPLVDMKVTQMPRYLIKRMGENVLLECGQDMSHETMYWYRQDPGLGLQLIYISYDVDSNSEGDIPKGYRVSRKKREHFSLILDSAKTNQTSVYFCASSSTNTEVFFGKGTRLTVLLEGQPKANPTVTLFPPSSEELQANKATLVCLISDFYPGAVTVAWKADGSPVKAGVETTKPSKQSNNKYAASSYLSLTPEQWKSHRSYSCQVTHEGSTVEKTVAPTECSGSQSFGLLDPKLCYLLDGILFIYGVILTALFLRVKFSRSADAPAYQQGQNQLYNELNLGRREEYDVLDKRRGRDPEMGGKPQRRKNPQEGLYNELQKDKMAEAYSEIGMKGERRRGKGHDGLYQGLSTATKDTYDALHMQALPPRRAKRSGSGATNFSLLKQAGDVEENPGPTSMDWIWRILFLVGAATGAHSFEDGDSVTQTEGLVTLTEGLPVMLNCTYQTIYSNPFLFWYVQHLNESPRLLLKSFTDNKRTEHQGFHATLHKSSSSFHLQKSSAQLSDSALYYCAFDTNTYKVIFGKGTHLHVLPNTRASTKGPSVFPLAPCSRSTSESTAALGCLVKDYFPEPVTVSWNSGALTSGVHTFPAVLQSSGLYSLSSVVTVPSSSLGTKTYTCNVDHKPSNTKVDKRVESKYGGTQSFGLLDPKLCYLLDGILFIYGVILTALFLRVKFSRSADAPAYQQGQNQLYNELNLGRREEYDVLDKRRGRDPEMGGKPQRRKNPQEGLYNELQKDKMAEAYSEIGMKGERRRGKGHDGLYQGLSTATKDTYDALHMQALPPRRAKRSGSGVKQTLNFDLLKLAGDVESNPGPSRGHMTEYKPTVRLATRDDVPRAVRTLAAAFADYPATRHTVDPDRHIERVTELQELFLTRVGLDIGKVWVADDGAAVAVWTTPESVEAGAVFAEIGPRMAELSGSRLAAQQQMEGLLAPHRPKEPAWFLATVGVSPDHQGKGLGSAVVLPGVEAAERAGVPAFLETSAPRNLPFYERLGFTVTADVEVPEGPRTWCMTRKPGA

SEQ ID NO: 10539 - protein, 1034 aa, -Artificial-Sequence
MALPVTALLLPLALLLHAARPLVDMKVTQMPRYLIKRMGENVLLECGQDMSHETMYWYRQDPGLGLQLIYISYDVDSNSEGDIPKGYRVSRKKREHFSLILDSAKTNQTSVYFCASSSTNTEVFFGKGTRLTVLLEGQPKANPTVTLFPPSSEELQANKATLVCLISDFYPGAVTVAWKADGSPVKAGVETTKPSKQSNNKYAASSYLSLTPEQWKSHRSYSCQVTHEGSTVEKTVAPTECSGSQSFGLLDPKLCYLLDGILFIYGVILTALFLRVKFSRSADAPAYQQGQNQLYNELNLGRREEYDVLDKRRGRDPEMGGKPQRRKNPQEGLYNELQKDKMAEAYSEIGMKGERRRGKGHDGLYQGLSTATKDTYDALHMQALPPRRAKRSGSGATNFSLLKQAGDVEENPGPTSMDWIWRILFLVGAATGAHSFEDGDSVTQTEGLVTLTEGLPVMLNCTYQTIYSNPFLFWYVQHLNESPRLLLKSFTDNKRTEHQGFHATLHKSSSSFHLQKSSAQLSDSALYYCAFDTNTYKVIFGKGTHLHVLPNTRASTKGPSVFPLAPCSRSTSESTAALGCLVKDYFPEPVTVSWNSGALTSGVHTFPAVLQSSGLYSLSSVVTVPSSNFGTQTYTCNVDHKPSNTKVDKTVERKCCGTQSFGLLDPKLCYLLDGILFIYGVILTALFLRVKFSRSADAPAYQQGQNQLYNELNLGRREEYDVLDKRRGRDPEMGGKPQRRKNPQEGLYNELQKDKMAEAYSEIGMKGERRRGKGHDGLYQGLSTATKDTYDALHMQALPPRRAKRSGSGVKQTLNFDLLKLAGDVESNPGPSRGHMTEYKPTVRLATRDDVPRAVRTLAAAFADYPATRHTVDPDRHIERVTELQELFLTRVGLDIGKVWVADDGAAVAVWTTPESVEAGAVFAEIGPRMAELSGSRLAAQQQMEGLLAPHRPKEPAWFLATVGVSPDHQGKGLGSAVVLPGVEAAERAGVPAFLETSAPRNLPFYERLGFTVTADVEVPEGPRTWCMTRKPGA

SEQ ID NO: 10540 - protein, 1049 aa, -Artificial-Sequence
MALPVTALLLPLALLLHAARPLVDMKVTQMPRYLIKRMGENVLLECGQDMSHETMYWYRQDPGLGLQLIYISYDVDSNSEGDIPKGYRVSRKKREHFSLILDSAKTNQTSVYFCASSSTNTEVFFGKGTRLTVLLEDLKNVFPPEVAVFEPSEAEISHTQKATLVCLATGFYPDHVELSWWVNGKEVHSGVSTDPQPLKEQPALNDSRYCLSSRLRVSATFWQNPRNHFRCQVQFYGLSENDEWTQDRAKPVTQIVSAEAWGRADCGSQSFGLLDPKLCYLLDGILFIYGVILTALFLRVKFSRSADAPAYQQGQNQLYNELNLGRREEYDVLDKRRGRDPEMGGKPQRRKNPQEGLYNELQKDKMAEAYSEIGMKGERRRGKGHDGLYQGLSTATKDTYDALHMQALPPRRAKRSGSGATNFSLLKQAGDVEENPGPTSMDWIWRILFLVGAATGAHSFEDGDSVTQTEGLVTLTEGLPVMLNCTYQTIYSNPFLFWYVQHLNESPRLLLKSFTDNKRTEHQGFHATLHKSSSSFHLQKSSAQLSDSALYYCAFDTNTYKVIFGKGTHLHVLPNTRIQNPDPAVYQLRDSKSSDKSVCLFTDFDSQTNVSQSKDSDVYITDKTVLDMRSMDFKSNSAVAWSNKSDFACANAFNNSIIPEDTFFPSPESSCGTQSFGLLDPKLCYLLDGILFIYGVILTALFLRVKFSRSADAPAYQQGQNQLYNELNLGRREEYDVLDKRRGRDPEMGGKPQRRKNPQEGLYNELQKDKMAEAYSEIGMKGERRRGKGHDGLYQGLSTATKDTYDALHMQALPPRRAKRSGSGVKQTLNFDLLKLAGDVESNPGPSRGHMTEYKPTVRLATRDDVPRAVRTLAAAFADYPATRHTVDPDRHIERVTELQELFLTRVGLDIGKVWVADDGAAVAVWTTPESVEAGAVFAEIGPRMAELSGSRLAAQQQMEGLLAPHRPKEPAWFLATVGVSPDHQGKGLGSAVVLPGVEAAERAGVPAFLETSAPRNLPFYERLGFTVTADVEVPEGPRTWCMTRKPGA

SEQ ID NO: 10541 - protein, 1049 aa, -Artificial-Sequence
MALPVTALLLPLALLLHAARPLVDMKVTQMPRYLIKRMGENVLLECGQDMSHETMYWYRQDPGLGLQLIYISYDVDSNSEGDIPKGYRVSRKKREHFSLILDSAKTNQTSVYFCASSSTNTEVFFGKGTRLTVLLEDLKNVFPPEVAVFEPSKAEIAHTQKATLVCLATGFYPDHVELSWWVNGKEVHSGVCTDPQPLKEQPALNDSRYCLSSRLRVSATFWQNPRNHFRCQVQFYGLSENDEWTQDRAKPVTQIVSAEAWGRADCGSQSFGLLDPKLCYLLDGILFIYGVILTALFLRVKFSRSADAPAYQQGQNQLYNELNLGRREEYDVLDKRRGRDPEMGGKPQRRKNPQEGLYNELQKDKMAEAYSEIGMKGERRRGKGHDGLYQGLSTATKDTYDALHMQALPPRRAKRSGSGATNFSLLKQAGDVEENPGPTSMDWIWRILFLVGAATGAHSFEDGDSVTQTEGLVTLTEGLPVMLNCTYQTIYSNPFLFWYVQHLNESPRLLLKSFTDNKRTEHQGFHATLHKSSSSFHLQKSSAQLSDSALYYCAFDTNTYKVIFGKGTHLHVLPNTRIQNPDPAVYQLRDSKSSDKSVCLFTDFDSQTNVSQSKDSDVYITDKCVLDMRSMDFKSNSAVAWSNKSDFACANAFNNSIIPEDTFFPSSDVPCGTQSFGLLDPKLCYLLDGILFIYGVILTALFLRVKFSRSADAPAYQQGQNQLYNELNLGRREEYDVLDKRRGRDPEMGGKPQRRKNPQEGLYNELQKDKMAEAYSEIGMKGERRRGKGHDGLYQGLSTATKDTYDALHMQALPPRRAKRSGSGVKQTLNFDLLKLAGDVESNPGPSRGHMTEYKPTVRLATRDDVPRAVRTLAAAFADYPATRHTVDPDRHIERVTELQELFLTRVGLDIGKVWVADDGAAVAVWTTPESVEAGAVFAEIGPRMAELSGSRLAAQQQMEGLLAPHRPKEPAWFLATVGVSPDHQGKGLGSAVVLPGVEAAERAGVPAFLETSAPRNLPFYERLGFTVTADVEVPEGPRTWCMTRKPGA

SEQ ID NO: 10542 - protein, 816 aa, -Artificial-Sequence
MALPVTALLLPLALLLHAARPLVDMKVTQMPRYLIKRMGENVLLECGQDMSHETMYWYRQDPGLGLQLIYISYDVDSNSEGDIPKGYRVSRKKREHFSLILDSAKTNQTSVYFCASSSTNTEVFFGKGTRLTVLLEDLKNVFPPEVAVFEPSEAEISHTQKATLVCLATGFYPDHVELSWWVNGKEVHSGVCTDPQPLKEQPALNDSRYCLSSRLRVSATFWQNPRNHFRCQVQFYGLSENDEWTQDRAKPVTQIVSAEAWGRADCGSQSFGLLDPKLCYLLDGILFIYGVILTALFLRVKFSRSADAPAYQQGQNQLYNELNLGRREEYDVLDKRRGRDPEMGGKPQRRKNPQEGLYNELQKDKMAEAYSEIGMKGERRRGKGHDGLYQGLSTATKDTYDALHMQALPPRRAKRSGSGATNFSLLKQAGDVEENPGPTSMDWIWRILFLVGAATGAHSFEDGDSVTQTEGLVTLTEGLPVMLNCTYQTIYSNPFLFWYVQHLNESPRLLLKSFTDNKRTEHQGFHATLHKSSSSFHLQKSSAQLSDSALYYCAFDTNTYKVIFGKGTHLHVLPNTRIQNPDPAVYQLRDSKSSDKSVCLFTDFDSQTNVSQSKDSDVYITDKCVLDMRSMDFKSNSAVAWSNKSDFACANAFNNSIIPEDTFFPSPESSCGTQSFGLLDPKLCYLLDGILFIYGVILTALFLRVKFSRSADAPAYQQGQNQLYNELNLGRREEYDVLDKRRGRDPEMGGKPQRRKNPQEGLYNELQKDKMAEAYSEIGMKGERRRGKGHDGLYQGLSTATKDTYDALHMQALPPR

SEQ ID NO: 10543 - protein, 821 aa, -Artificial-Sequence
MALPVTALLLPLALLLHAARPLVDMKVTQMPRYLIKRMGENVLLECGQDMSHETMYWYRQDPGLGLQLIYISYDVDSNSEGDIPKGYRVSRKKREHFSLILDSAKTNQTSVYFCASSSTNTEVFFGKGTRLTVLLEQSFGLLDPKLCYLLDGILFIYGVILTALFLRVKFSRSADAPAYQQGQNQLYNELNLGRREEYDVLDKRRGRDPEMGGKPQRRKNPQEGLYNELQKDKMAEAYSEIGMKGERRRGKGHDGLYQGLSTATKDTYDALHMQALPPRRAKRSGSGATNFSLLKQAGDVEENPGPTSMDWIWRILFLVGAATGAHSFEDGDSVTQTEGLVTLTEGLPVMLNCTYQTIYSNPFLFWYVQHLNESPRLLLKSFTDNKRTEHQGFHATLHKSSSSFHLQKSSAQLSDSALYYCAFDTNTYKVIFGKGTHLHVLPNTRQSFGLLDPKLCYLLDGILFIYGVILTALFLRVKFSRSADAPAYQQGQNQLYNELNLGRREEYDVLDKRRGRDPEMGGKPQRRKNPQEGLYNELQKDKMAEAYSEIGMKGERRRGKGHDGLYQGLSTATKDTYDALHMQALPPRRAKRSGSGVKQTLNFDLLKLAGDVESNPGPSRGHMTEYKPTVRLATRDDVPRAVRTLAAAFADYPATRHTVDPDRHIERVTELQELFLTRVGLDIGKVWVADDGAAVAVWTTPESVEAGAVFAEIGPRMAELSGSRLAAQQQMEGLLAPHRPKEPAWFLATVGVSPDHQGKGLGSAVVLPGVEAAERAGVPAFLETSAPRNLPFYERLGFTVTADVEVPEGPRTWCMTRKPGA

SEQ ID NO: 10544 - protein, 857 aa, -Artificial-Sequence
MALPVTALLLPLALLLHAARPLVDMKVTQMPRYLIKRMGENVLLECGQDMSHETMYWYRQDPGLGLQLIYISYDVDSNSEGDIPKGYRVSRKKREHFSLILDSAKTNQTSVYFCASSSTNTEVFFGKGTRLTVLLEDLKNVFPPEVAVFEPSEAEISHTQKATLVCLATGFYPDHVELSWWVNGKEVHSGVCTDPQPLKEQPALNDSRYCLSSRLRVSATFWQNPRNHFRCQVQFYGLSENDEWTQDRAKPVTQIVSAEAWGRADCGSQSFGLLDPKLCYLLDGILFIYGVILTALFLRSKRSRLLHSDYMNMTPRRPGPTRKHYQPYAPPRDFAAYRSRVKFSRSADAPAYQQGQNQLYNELNLGRREEYDVLDKRRGRDPEMGGKPQRRKNPQEGLYNELQKDKMAEAYSEIGMKGERRRGKGHDGLYQGLSTATKDTYDALHMQALPPRRAKRSGSGATNFSLLKQAGDVEENPGPTSMDWIWRILFLVGAATGAHSFEDGDSVTQTEGLVTLTEGLPVMLNCTYQTIYSNPFLFWYVQHLNESPRLLLKSFTDNKRTEHQGFHATLHKSSSSFHLQKSSAQLSDSALYYCAFDTNTYKVIFGKGTHLHVLPNTRIQNPDPAVYQLRDSKSSDKSVCLFTDFDSQTNVSQSKDSDVYITDKCVLDMRSMDFKSNSAVAWSNKSDFACANAFNNSIIPEDTFFPSPESSCGTQSFGLLDPKLCYLLDGILFIYGVILTALFLRVKFSRSADAPAYQQGQNQLYNELNLGRREEYDVLDKRRGRDPEMGGKPQRRKNPQEGLYNELQKDKMAEAYSEIGMKGERRRGKGHDGLYQGLSTATKDTYDALHMQALPPR

SEQ ID NO: 10545 - protein, 898 aa, -Artificial-Sequence
MALPVTALLLPLALLLHAARPLVDMKVTQMPRYLIKRMGENVLLECGQDMSHETMYWYRQDPGLGLQLIYISYDVDSNSEGDIPKGYRVSRKKREHFSLILDSAKTNQTSVYFCASSSTNTEVFFGKGTRLTVLLEDLKNVFPPEVAVFEPSEAEISHTQKATLVCLATGFYPDHVELSWWVNGKEVHSGVCTDPQPLKEQPALNDSRYCLSSRLRVSATFWQNPRNHFRCQVQFYGLSENDEWTQDRAKPVTQIVSAEAWGRADCGSQSFGLLDPKLCYLLDGILFIYGVILTALFLRSKRSRLLHSDYMNMTPRRPGPTRKHYQPYAPPRDFAAYRSRVKFSRSADAPAYQQGQNQLYNELNLGRREEYDVLDKRRGRDPEMGGKPQRRKNPQEGLYNELQKDKMAEAYSEIGMKGERRRGKGHDGLYQGLSTATKDTYDALHMQALPPRRAKRSGSGATNFSLLKQAGDVEENPGPTSMDWIWRILFLVGAATGAHSFEDGDSVTQTEGLVTLTEGLPVMLNCTYQTIYSNPFLFWYVQHLNESPRLLLKSFTDNKRTEHQGFHATLHKSSSSFHLQKSSAQLSDSALYYCAFDTNTYKVIFGKGTHLHVLPNTRIQNPDPAVYQLRDSKSSDKSVCLFTDFDSQTNVSQSKDSDVYITDKCVLDMRSMDFKSNSAVAWSNKSDFACANAFNNSIIPEDTFFPSPESSCGTQSFGLLDPKLCYLLDGILFIYGVILTALFLRSKRSRLLHSDYMNMTPRRPGPTRKHYQPYAPPRDFAAYRSRVKFSRSADAPAYQQGQNQLYNELNLGRREEYDVLDKRRGRDPEMGGKPQRRKNPQEGLYNELQKDKMAEAYSEIGMKGERRRGKGHDGLYQGLSTATKDTYDALHMQALPPR

SEQ ID NO: 10546 - protein, 816 aa, -Artificial-Sequence
MALPVTALLLPLALLLHAARPLVDMKVTQMPRYLIKRMGENVLLECGQDMSHETMYWYRQDPGLGLQLIYISYDVDSNSEGDIPKGYRVSRKKREHFSLILDSAKTNQTSVYFCASSSTNTEVFFGKGTRLTVLLEDLKNVFPPEVAVFEPSEAEISHTQKATLVCLATGFYPDHVELSWWVNGKEVHSGVSTDPQPLKEQPALNDSRYCLSSRLRVSATFWQNPRNHFRCQVQFYGLSENDEWTQDRAKPVTQIVSAEAWGRADCGSQSFGLLDPKLCYLLDGILFIYGVILTALFLRVKFSRSADAPAYQQGQNQLYNELNLGRREEYDVLDKRRGRDPEMGGKPQRRKNPQEGLYNELQKDKMAEAYSEIGMKGERRRGKGHDGLYQGLSTATKDTYDALHMQALPPRRAKRSGSGATNFSLLKQAGDVEENPGPTSMDWIWRILFLVGAATGAHSFEDGDSVTQTEGLVTLTEGLPVMLNCTYQTIYSNPFLFWYVQHLNESPRLLLKSFTDNKRTEHQGFHATLHKSSSSFHLQKSSAQLSDSALYYCAFDTNTYKVIFGKGTHLHVLPNTRIQNPDPAVYQLRDSKSSDKSVCLFTDFDSQTNVSQSKDSDVYITDKTVLDMRSMDFKSNSAVAWSNKSDFACANAFNNSIIPEDTFFPSPESSCGTQSFGLLDPKLCYLLDGILFIYGVILTALFLRVKFSRSADAPAYQQGQNQLYNELNLGRREEYDVLDKRRGRDPEMGGKPQRRKNPQEGLYNELQKDKMAEAYSEIGMKGERRRGKGHDGLYQGLSTATKDTYDALHMQALPPR

SEQ ID NO: 10547 - protein, 1024 aa, -Artificial-Sequence
MALPVTALLLPLALLLHAARPLVDMKVTQMPRYLIKRMGENVLLECGQDMSHETMYWYRQDPGLGLQLIYISYDVDSNSEGDIPKGYRVSRKKREHFSLILDSAKTNQTSVYFCASSSTNTEVFFGKGTRLTVLLEDKQLDADVSPKPTIFLPSIAETKLQKAGTYLCLLEKFFPDVIKIHWQEKKSNTILGSQEGNTMKTNDTYMKFSWLTVPEKSLDKEHRCIVRHENNKNGVDQEIIFPPIKTDVITGSQSFGLLDPKLCYLLDGILFIYGVILTALFLRVKFSRSADAPAYQQGQNQLYNELNLGRREEYDVLDKRRGRDPEMGGKPQRRKNPQEGLYNELQKDKMAEAYSEIGMKGERRRGKGHDGLYQGLSTATKDTYDALHMQALPPRRAKRSGSGATNFSLLKQAGDVEENPGPTSMDWIWRILFLVGAATGAHSFEDGDSVTQTEGLVTLTEGLPVMLNCTYQTIYSNPFLFWYVQHLNESPRLLLKSFTDNKRTEHQGFHATLHKSSSSFHLQKSSAQLSDSALYYCAFDTNTYKVIFGKGTHLHVLPNTRSQPHTKPSVFVMKNGTNVACLVKEFYPKDIRINLVSSKKITEFDPAIVISPSGKYNAVKLGKYEDSNSVTCSVQHDNKTVHSTDFGTQSFGLLDPKLCYLLDGILFIYGVILTALFLRVKFSRSADAPAYQQGQNQLYNELNLGRREEYDVLDKRRGRDPEMGGKPQRRKNPQEGLYNELQKDKMAEAYSEIGMKGERRRGKGHDGLYQGLSTATKDTYDALHMQALPPRRAKRSGSGVKQTLNFDLLKLAGDVESNPGPSRGHMTEYKPTVRLATRDDVPRAVRTLAAAFADYPATRHTVDPDRHIERVTELQELFLTRVGLDIGKVWVADDGAAVAVWTTPESVEAGAVFAEIGPRMAELSGSRLAAQQQMEGLLAPHRPKEPAWFLATVGVSPDHQGKGLGSAVVLPGVEAAERAGVPAFLETSAPRNLPFYERLGFTVTADVEVPEGPRTWCMTRKPGA

SEQ ID NO: 10548 - protein, 894 aa, -Artificial-Sequence
MALPVTALLLPLALLLHAARPLVDMKVTQMPRYLIKRMGENVLLECGQDMSHETMYWYRQDPGLGLQLIYISYDVDSNSEGDIPKGYRVSRKKREHFSLILDSAKTNQTSVYFCASSSTNTEVFFGKGTRLTVLLEGQPKANPTVTLFPPSSEELQANKATLVCLISDFYPGAVTVAWKADGSPVKAGVETTKPSKQSNNKYAASSYLSLTPEQWKSHRSYSCQVTHEGSTVEKTVAPTECSTTPGERSSLPAFYPGTSGSCSGCGSLSLPLLAGLVAADAVASLLIVGAVFLCARPRRSPAQEDGKVYINMPGRGRAKRSGSGATNFSLLKQAGDVEENPGPTSMDWIWRILFLVGAATGAHSFEDGDSVTQTEGLVTLTEGLPVMLNCTYQTIYSNPFLFWYVQHLNESPRLLLKSFTDNKRTEHQGFHATLHKSSSSFHLQKSSAQLSDSALYYCAFDTNTYKVIFGKGTHLHVLPNTRASTKGPSVFPLAPSSKSTSGGTAALGCLVKDYFPEPVTVSWNSGALTSGVHTFPAVLQSSGLYSLSSVVTVPSSSLGTQTYICNVNHKPSNTKVDKRVEPKSCTTPGERSSLPAFYPGTSGSCSGCGSLSLPLLAGLVAADAVASLLIVGAVFLCARPRRSPAQEDGKVYINMPGRGRAKRSGSGVKQTLNFDLLKLAGDVESNPGPSRGHMTEYKPTVRLATRDDVPRAVRTLAAAFADYPATRHTVDPDRHIERVTELQELFLTRVGLDIGKVWVADDGAAVAVWTTPESVEAGAVFAEIGPRMAELSGSRLAAQQQMEGLLAPHRPKEPAWFLATVGVSPDHQGKGLGSAVVLPGVEAAERAGVPAFLETSAPRNLPFYERLGFTVTADVEVPEGPRTWCMTRKPGAVD

SEQ ID NO: 10549 - protein, 721 aa, -Artificial-Sequence
MALPVTALLLPLALLLHAARPLVDMKVTQMPRYLIKRMGENVLLECGQDMSHETMYWYRQDPGLGLQLIYISYDVDSNSEGDIPKGYRVSRKKREHFSLILDSAKTNQTSVYFCASSSTNTEVFFGKGTRLTVLLEGDIENTSLAPEDPTFPADTWGTYLLTTETGLQKDHALWDHTAQNLLRMGLAFLVLVALVWFLVEDWLSRKRTRERASRASTWEGRRRLNTQTLRAKRSGSGATNFSLLKQAGDVEENPGPTSMDWIWRILFLVGAATGAHSFEDGDSVTQTEGLVTLTEGLPVMLNCTYQTIYSNPFLFWYVQHLNESPRLLLKSFTDNKRTEHQGFHATLHKSSSSFHLQKSSAQLSDSALYYCAFDTNTYKVIFGKGTHLHVLPNTRGDIENTSLAPEDPTFPADTWGTYLLTTETGLQKDHALWDHTAQNLLRMGLAFLVLVALVWFLVEDWLSRKRTRERASRASTWEGRRRLNTQTLRAKRSGSGVKQTLNFDLLKLAGDVESNPGPSRGHMTEYKPTVRLATRDDVPRAVRTLAAAFADYPATRHTVDPDRHIERVTELQELFLTRVGLDIGKVWVADDGAAVAVWTTPESVEAGAVFAEIGPRMAELSGSRLAAQQQMEGLLAPHRPKEPAWFLATVGVSPDHQGKGLGSAVVLPGVEAAERAGVPAFLETSAPRNLPFYERLGFTVTADVEVPEGPRTWCMTRKPGA

SEQ ID NO: 10550 - protein, 665 aa, -Artificial-Sequence
MALPVTALLLPLALLLHAARPLVDMKVTQMPRYLIKRMGENVLLECGQDMSHETMYWYRQDPGLGLQLIYISYDVDSNSEGDIPKGYRVSRKKREHFSLILDSAKTNQTSVYFCASSSTNTEVFFGKGTRLTVLLEITQGLAVSTISSFFPPGYQVSFCLVMVLLFAVDTGLYFSVKTNIRSSTRDWKDHKFKWRKDPQDKRAKRSGSGATNFSLLKQAGDVEENPGPTSMDWIWRILFLVGAATGAHSFEDGDSVTQTEGLVTLTEGLPVMLNCTYQTIYSNPFLFWYVQHLNESPRLLLKSFTDNKRTEHQGFHATLHKSSSSFHLQKSSAQLSDSALYYCAFDTNTYKVIFGKGTHLHVLPNTRITQGLAVSTISSFFPPGYQVSFCLVMVLLFAVDTGLYFSVKTNIRSSTRDWKDHKFKWRKDPQDKRAKRSGSGVKQTLNFDLLKLAGDVESNPGPSRGHMTEYKPTVRLATRDDVPRAVRTLAAAFADYPATRHTVDPDRHIERVTELQELFLTRVGLDIGKVWVADDGAAVAVWTTPESVEAGAVFAEIGPRMAELSGSRLAAQQQMEGLLAPHRPKEPAWFLATVGVSPDHQGKGLGSAVVLPGVEAAERAGVPAFLETSAPRNLPFYERLGFTVTADVEVPEGPRTWCMTRKPGA

SEQ ID NO: 10551 - protein, 901 aa, -Artificial-Sequence
MALPVTALLLPLALLLHAARPLVDMKVTQMPRYLIKRMGENVLLECGQDMSHETMYWYRQDPGLGLQLIYISYDVDSNSEGDIPKGYRVSRKKREHFSLILDSAKTNQTSVYFCASSSTNTEVFFGKGTRLTVLLELWVSQPPEIRTLEGSSAFLPCSFNASQGRLAIGSVTWFRDEVVPGKEVRNGTPEFRGRLAPLASSRFLHDHQAELHIRDVRGHDASIYVCRVEVLGLGVGTGNGTRLVVEKEHPQLGAGTVLLLRAGFYAVSFLSVAVGSTVYYQGKCLTWKGPRRQLPAVVPAPLPPPCGSSAHLLPPVPGGRAKRSGSGATNFSLLKQAGDVEENPGPTSMDWIWRILFLVGAATGAHSFEDGDSVTQTEGLVTLTEGLPVMLNCTYQTIYSNPFLFWYVQHLNESPRLLLKSFTDNKRTEHQGFHATLHKSSSSFHLQKSSAQLSDSALYYCAFDTNTYKVIFGKGTHLHVLPNTRLWVSQPPEIRTLEGSSAFLPCSFNASQGRLAIGSVTWFRDEVVPGKEVRNGTPEFRGRLAPLASSRFLHDHQAELHIRDVRGHDASIYVCRVEVLGLGVGTGNGTRLVVEKEHPQLGAGTVLLLRAGFYAVSFLSVAVGSTVYYQGKCLTWKGPRRQLPAVVPAPLPPPCGSSAHLLPPVPGGRAKRSGSGVKQTLNFDLLKLAGDVESNPGPSRGHMTEYKPTVRLATRDDVPRAVRTLAAAFADYPATRHTVDPDRHIERVTELQELFLTRVGLDIGKVWVADDGAAVAVWTTPESVEAGAVFAEIGPRMAELSGSRLAAQQQMEGLLAPHRPKEPAWFLATVGVSPDHQGKGLGSAVVLPGVEAAERAGVPAFLETSAPRNLPFYERLGFTVTADVEVPEGPRTWCMTRKPGA

SEQ ID NO: 10552 - protein, 901 aa, -Artificial-Sequence; identical to SEQ ID NO: 10551

SEQ ID NO: 10553 - protein, 797 aa, -Artificial-Sequence
MALPVTALLLPLALLLHAARPLVDMKVTQMPRYLIKRMGENVLLECGQDMSHETMYWYRQDPGLGLQLIYISYDVDSNSEGDIPKGYRVSRKKREHFSLILDSAKTNQTSVYFCASSSTNTEVFFGKGTRLTVLGQPKANPTVTLFPPSSEELQANKATLVCLISDFYPGAVTVAWKADGSPVKAGVETTKPSKQSNNKYAASSYLSLTPEQWKSHRSYSCQVTHEGSTVEKTVAPTECSGSQSFGLLDPKLCYLLDGILFIYGVILTALFLRVKFSRSADAPAYQQGQNQLYNELNLGRREEYDVLDKRRGRDPEMGGKPQRRKNPQEGLYNELQKDKMAEAYSEIGMKGERRRGKGHDGLYQGLSTATKDTYDALHMQALPPRRAKRSGSGATNFSLLKQAGDVEENPGPTSMDWIWRILFLVGAATGAHSFEDGDSVTQTEGLVTLTEGLPVMLNCTYQTIYSNPFLFWYVQHLNESPRLLLKSFTDNKRTEHQGFHATLHKSSSSFHLQKSSAQLSDSALYYCAFDTNTYKVIFGKGTHLHVLPNASTKGPSVFPLAPSSKSTSGGTAALGCLVKDYFPEPVTVSWNSGALTSGVHTFPAVLQSSGLYSLSSVVTVPSSSLGTQTYICNVNHKPSNTKVDKRVEPKSCGTQSFGLLDPKLCYLLDGILFIYGVILTALFLRVKFSRSADAPAYQQGQNQLYNELNLGRREEYDVLDKRRGRDPEMGGKPQRRKNPQEGLYNELQKDKMAEAYSEIGMKGERRRGKGHDGLYQGLSTATKDTYDALHMQALPPR

SEQ ID NO: 10554 - protein, 563 aa, -Artificial-Sequence
MALPVTALLLPLALLLHAARPLVDMKVTQMPRYLIKRMGENVLLECGQDMSHETMYWYRQDPGLGLQLIYISYDVDSNSEGDIPKGYRVSRKKREHFSLILDSAKTNQTSVYFCASSSTNTEVFFGKGTRLTVLLEQSFGLLDPKLCYLLDGILFIYGVILTALFLRVKFSRSADAPAYQQGQNQLYNELNLGRREEYDVLDKRRGRDPEMGGKPQRRKNPQEGLYNELQKDKMAEAYSEIGMKGERRRGKGHDGLYQGLSTATKDTYDALHMQALPPRRAKRSGSGATNFSLLKQAGDVEENPGPTSMDWIWRILFLVGAATGAHSFEDGDSVTQTEGLVTLTEGLPVMLNCTYQTIYSNPFLFWYVQHLNESPRLLLKSFTDNKRTEHQGFHATLHKSSSSFHLQKSSAQLSDSALYYCAFDTNTYKVIFGKGTHLHVLPNTRQSFGLLDPKLCYLLDGILFIYGVILTALFLRVKFSRSADAPAYQQGQNQLYNELNLGRREEYDVLDKRRGRDPEMGGKPQRRKNPQEGLYNELQKDKMAEAYSEIGMKGERRRGKGHD

SEQ ID NO: 10555 - protein, 911 aa, -Artificial-Sequence
MALPVTALLLPLALLLHAARPLVDMKVTQMPRYLIKRMGENVLLECGQDMSHETMYWYRQDPGLGLQLIYISYDVDSNSEGDIPKGYRVSRKKREHFSLILDSAKTNQTSVYFCASSSTNTEVFFGKGTRLTVLLETTPGERSSLPAFYPGTSGSCSGCGSLSLPLLAGLVAADAVASLLIVGAVFLCARPRRSPAQEDGKVYINMPGRGSTSRVKFSRSADAPAYQQGQNQLYNELNLGRREEYDVLDKRRGRDPEMGGKPQRRKNPQEGLYNELQKDKMAEAYSEIGMKGERRRGKGHDGLYQGLSTATKDTYDALHMQALPPRRAKRSGSGATNFSLLKQAGDVEENPGPMDWIWRILFLVGAATGAHSFEDGDSVTQTEGLVTLTEGLPVMLNCTYQTIYSNPFLFWYVQHLNESPRLLLKSFTDNKRTEHQGFHATLHKSSSSFHLQKSSAQLSDSALYYCAFDTNTYKVIFGKGTHLHVLPNTRTTPGERSSLPAFYPGTSGSCSGCGSLSLPLLAGLVAADAVASLLIVGAVFLCARPRRSPAQEDGKVYINMPGRGSSRRVKFSRSADAPAYQQGQNQLYNELNLGRREEYDVLDKRRGRDPEMGGKPQRRKNPQEGLYNELQKDKMAEAYSEIGMKGERRRGKGHDGLYQGLSTATKDTYDALHMQALPPRRAKRSGSGVKQTLNFDLLKLAGDVESNPGPGHMTEYKPTVRLATRDDVPRAVRTLAAAFADYPATRHTVDPDRHIERVTELQELFLTRVGLDIGKVWVADDGAAVAVWTTPESVEAGAVFAEIGPRMAELSGSRLAAQQQMEGLLAPHRPKEPAWFLATVGVSPDHQGKGLGSAVVLPGVEAAERAGVPAFLETSAPRNLPFYERLGFTVTADVEVPEGPRTWCMTRKPGA

SEQ ID NO: 10556 - protein, 911 aa, -Artificial-Sequence; identical to SEQ ID NO: 10555

SEQ ID NO: 10557 - protein, 1113 aa, -Artificial-Sequence
MALPVTALLLPLALLLHAARPLVDMKVTQMPRYLIKRMGENVLLECGQDMSHETMYWYRQDPGLGLQLIYISYDVDSNSEGDIPKGYRVSRKKREHFSLILDSAKTNQTSVYFCASSSTNTEVFFGKGTRLTVLLEGQPKANPTVTLFPPSSEELQANKATLVCLISDFYPGAVTVAWKADGSPVKAGVETTKPSKQSNNKYAASSYLSLTPEQWKSHRSYSCQVTHEGSTVEKTVAPTECSGSTTPGERSSLPAFYPGTSGSCSGCGSLSLPLLAGLVAADAVASLLIVGAVFLCARPRRSPAQEDGKVYINMPGRGSTSRVKFSRSADAPAYQQGQNQLYNELNLGRREEYDVLDKRRGRDPEMGGKPQRRKNPQEGLYNELQKDKMAEAYSEIGMKGERRRGKGHDGLYQGLSTATKDTYDALHMQALPPRRAKRSGSGATNFSLLKQAGDVEENPGPMDWIWRILFLVGAATGAHSFEDGDSVTQTEGLVTLTEGLPVMLNCTYQTIYSNPFLFWYVQHLNESPRLLLKSFTDNKRTEHQGFHATLHKSSSSFHLQKSSAQLSDSALYYCAFDTNTYKVIFGKGTHLHVLPNTRASTKGPSVFPLAPSSKSTSGGTAALGCLVKDYFPEPVTVSWNSGALTSGVHTFPAVLQSSGLYSLSSVVTVPSSSLGTQTYICNVNHKPSNTKVDKRVEPKSCGTTTPGERSSLPAFYPGTSGSCSGCGSLSLPLLAGLVAADAVASLLIVGAVFLCARPRRSPAQEDGKVYINMPGRGSSRRVKFSRSADAPAYQQGQNQLYNELNLGRREEYDVLDKRRGRDPEMGGKPQRRKNPQEGLYNELQKDKMAEAYSEIGMKGERRRGKGHDGLYQGLSTATKDTYDALHMQALPPRRAKRSGSGVKQTLNFDLLKLAGDVESNPGPGHMATYEVLCEVARKLGTDDREVVLFLLNVFIPQPTLAQLIGALRALKEEGRLTFPLLAECLFRAGRRDLLRDLLHLDPRFLERHLAGTMSYFSPYQLTVLHVDGELCARDIRSLIFLSKDTIGSRSTPQTFLHWVYCMENLDLLGPTDVDALMSMLRSLSRVDLQRQVQTLMGLHLSGPSHSQHYRHTP

SEQ ID NO: 10558 - protein, 1166 aa, -Artificial-Sequence
MALPVTALLLPLALLLHAARPLVDMKVTQMPRYLIKRMGENVLLECGQDMSHETMYWYRQDPGLGLQLIYISYDVDSNSEGDIPKGYRVSRKKREHFSLILDSAKTNQTSVYFCASSSTNTEVFFGKGTRLTVLLEGQPKANPTVTLFPPSSEELQANKATLVCLISDFYPGAVTVAWKADGSPVKAGVETTKPSKQSNNKYAASSYLSLTPEQWKSHRSYSCQVTHEGSTVEKTVAPTECSGSTTPGERSSLPAFYPGTSGSCSGCGSLSLPLLAGLVAADAVASLLIVGAVFLCARPRRSPAQEDGKVYINMPGRGSTSRVKFSRSADAPAYQQGQNQLYNELNLGRREEYDVLDKRRGRDPEMGGKPQRRKNPQEGLYNELQKDKMAEAYSEIGMKGERRRGKGHDGLYQGLSTATKDTYDALHMQALPPRRAKRSGSGATNFSLLKQAGDVEENPGPMDWIWRILFLVGAATGAHSFEDGDSVTQTEGLVTLTEGLPVMLNCTYQTIYSNPFLFWYVQHLNESPRLLLKSFTDNKRTEHQGFHATLHKSSSSFHLQKSSAQLSDSALYYCAFDTNTYKVIFGKGTHLHVLPNTRASTKGPSVFPLAPSSKSTSGGTAALGCLVKDYFPEPVTVSWNSGALTSGVHTFPAVLQSSGLYSLSSVVTVPSSSLGTQTYICNVNHKPSNTKVDKRVEPKSCGTTTPGERSSLPAFYPGTSGSCSGCGSLSLPLLAGLVAADAVASLLIVGAVFLCARPRRSPAQEDGKVYINMPGRGSSRRVKFSRSADAPAYQQGQNQLYNELNLGRREEYDVLDKRRGRDPEMGGKPQRRKNPQEGLYNELQKDKMAEAYSEIGMKGERRRGKGHDGLYQGLSTATKDTYDALHMQALPPRRAKRSGSGVKQTLNFDLLKLAGDVESNPGPGHMSDSKEVPSLPFLRHLLEELDSHEDSLLLFLCHDAAPGCTTVTQALCSLSQQRKLTLAALVEMLYVLQRMDLLKSRFGLSKEGAEQLLGTSFLTRYRKLMVCVGEELDSSELRALRLFACNLNPSLSTALSESSRFVELVLALENVGLVSPSSVSVLADMLRTLRRLDLCQQLVEYEQQEQARYRYCYAASPSLPVRTLRRGHGASEHEQLCMPVQESSDSPELLRTPVQESSSDSPEQTT

SEQ ID NO: 10559 - protein, 1124 aa, -Artificial-Sequence
MALPVTALLLPLALLLHAARPLVDMKVTQMPRYLIKRMGENVLLECGQDMSHETMYWYRQDPGLGLQLIYISYDVDSNSEGDIPKGYRVSRKKREHFSLILDSAKTNQTSVYFCASSSTNTEVFFGKGTRLTVLLEGQPKANPTVTLFPPSSEELQANKATLVCLISDFYPGAVTVAWKADGSPVKAGVETTKPSKQSNNKYAASSYLSLTPEQWKSHRSYSCQVTHEGSTVEKTVAPTECSGSTTPGERSSLPAFYPGTSGSCSGCGSLSLPLLAGLVAADAVASLLIVGAVFLCARPRRSPAQEDGKVYINMPGRGSTSRVKFSRSADAPAYQQGQNQLYNELNLGRREEYDVLDKRRGRDPEMGGKPQRRKNPQEGLYNELQKDKMAEAYSEIGMKGERRRGKGHDGLYQGLSTATKDTYDALHMQALPPRRAKRSGSGATNFSLLKQAGDVEENPGPMDWIWRILFLVGAATGAHSFEDGDSVTQTEGLVTLTEGLPVMLNCTYQTIYSNPFLFWYVQHLNESPRLLLKSFTDNKRTEHQGFHATLHKSSSSFHLQKSSAQLSDSALYYCAFDTNTYKVIFGKGTHLHVLPNTRASTKGPSVFPLAPSSKSTSGGTAALGCLVKDYFPEPVTVSWNSGALTSGVHTFPAVLQSSGLYSLSSVVTVPSSSLGTQTYICNVNHKPSNTKVDKRVEPKSCGTTTPGERSSLPAFYPGTSGSCSGCGSLSLPLLAGLVAADAVASLLIVGAVFLCARPRRSPAQEDGKVYINMPGRGSSRRVKFSRSADAPAYQQGQNQLYNELNLGRREEYDVLDKRRGRDPEMGGKPQRRKNPQEGLYNELQKDKMAEAYSEIGMKGERRRGKGHDGLYQGLSTATKDTYDALHMQALPPRRAKRSGSGVKQTLNFDLLKLAGDVESNPGPGHMTEYKPTVRLATRDDVPRAVRTLAAAFADYPATRHTVDPDRHIERVTELQELFLTRVGLDIGKVWVADDGAAVAVWTTPESVEAGAVFAEIGPRMAELSGSRLAAQQQMEGLLAPHRPKEPAWFLATVGVSPDHQGKGLGSAVVLPGVEAAERAGVPAFLETSAPRNLPFYERLGFTVTADVEVPEGPRTWCMTRKPGA

SEQ ID NO: 10560 - protein, 818 aa, -Artificial-Sequence
MALPVTALLLPLALLLHAARPEFLVDMKVTQMPRYLIKRMGENVLLECGQDMSHETMYWYRQDPGLGLQLIYISYDVDSNSEGDIPKGYRVSRKKREHFSLILDSAKTNQTSVYFCASSSTNTEVFFGKGTRLTVLLEDLKNVFPPEVAVFEPSEAEISHTQKATLVCLATGFYPDHVELSWWVNGKEVHSGVSTDPQPLKEQPALNDSRYCLSSRLRVSATFWQNPRNHFRCQVQFYGLSENDEWTQDRAKPVTQIVSAEAWGRADCGSQSFGLLDPKLCYLLDGILFIYGVILTALFLRVKFSRSADAPAYQQGQNQLYNELNLGRREEYDVLDKRRGRDPEMGGKPQRRKNPQEGLYNELQKDKMAEAYSEIGMKGERRRGKGHDGLYQGLSTATKDTYDALHMQALPPRRAKRSGSGATNFSLLKQAGDVEENPGPTSMDWIWRILFLVGAATGAHSFEDGDSVTQTEGLVTLTEGLPVMLNCTYQTIYSNPFLFWYVQHLNESPRLLLKSFTDNKRTEHQGFHATLHKSSSSFHLQKSSAQLSDSALYYCAFDTNTYKVIFGKGTHLHVLPNTRIQNPDPAVYQLRDSKSSDKSVCLFTDFDSQTNVSQSKDSDVYITDKTVLDMRSMDFKSNSAVAWSNKSDFACANAFNNSIIPEDTFFPSPESSCGTQSFGLLDPKLCYLLDGILFIYGVILTALFLRVKFSRSADAPAYQQGQNQLYNELNLGRREEYDVLDKRRGRDPEMGGKPQRRKNPQEGLYNELQKDKMAEAYSEIGMKGERRRGKGHDGLYQGLSTATKDTYDALHMQALPPR

SEQ ID NO: 10561 - protein, 860 aa, -Artificial-Sequence
MALPVTALLLPLALLLHAARPEFLVDMKVTQMPRYLIKRMGENVLLECGQDMSHETMYWYRQDPGLGLQLIYISYDVDSNSEGDIPKGYRVSRKKREHFSLILDSAKTNQTSVYFCASSSTNTEVFFGKGTRLTVLLEDLKNVFPPEVAVFEPSEAEISHTQKATLVCLATGFYPDHVELSWWVNGKEVHSGVSTDPQPLKEQPALNDSRYCLSSRLRVSATFWQNPRNHFRCQVQFYGLSENDEWTQDRAKPVTQIVSAEAWGRADCGSQSFGLLDPKLCYLLDGILFIYGVILTALFLRVKFSRSADAPAYQQGQNQLYNELNLGRREEYDVLDKRRGRDPEMGGKPQRRKNPQEGLYNELQKDKMAEAYSEIGMKGERRRGKGHDGLYQGLSTATKDTYDALHMQALPPRRAKRSGSGATNFSLLKQAGDVEENPGPTSMDWIWRILFLVGAATGAHSFEDGDSVTQTEGLVTLTEGLPVMLNCTYQTIYSNPFLFWYVQHLNESPRLLLKSFTDNKRTEHQGFHATLHKSSSSFHLQKSSAQLSDSALYYCAFDTNTYKVIFGKGTHLHVLPNTRIQNPDPAVYQLRDSKSSDKSVCLFTDFDSQTNVSQSKDSDVYITDKTVLDMRSMDFKSNSAVAWSNKSDFACANAFNNSIIPEDTFFPSPESSCGTQSFGLLDPKLCYLLDGILFIYGVILTALFLKRGRKKLLYIFKQPFMRPVQTTQEEDGCSCRFPEEEEGGCELRVKFSRSADAPAYQQGQNQLYNELNLGRREEYDVLDKRRGRDPEMGGKPQRRKNPQEGLYNELQKDKMAEAYSEIGMKGERRRGKGHDGLYQGLSTATKDTYDALHMQALPPR

SEQ ID NO: 10562 - protein, 859 aa, -Artificial-Sequence
MALPVTALLLPLALLLHAARPEFLVDMKVTQMPRYLIKRMGENVLLECGQDMSHETMYWYRQDPGLGLQLIYISYDVDSNSEGDIPKGYRVSRKKREHFSLILDSAKTNQTSVYFCASSSTNTEVFFGKGTRLTVLLEDLKNVFPPEVAVFEPSEAEISHTQKATLVCLATGFYPDHVELSWWVNGKEVHSGVSTDPQPLKEQPALNDSRYCLSSRLRVSATFWQNPRNHFRCQVQFYGLSENDEWTQDRAKPVTQIVSAEAWGRADCGSQSFGLLDPKLCYLLDGILFIYGVILTALFLRVKFSRSADAPAYQQGQNQLYNELNLGRREEYDVLDKRRGRDPEMGGKPQRRKNPQEGLYNELQKDKMAEAYSEIGMKGERRRGKGHDGLYQGLSTATKDTYDALHMQALPPRRAKRSGSGATNFSLLKQAGDVEENPGPTSMDWIWRILFLVGAATGAHSFEDGDSVTQTEGLVTLTEGLPVMLNCTYQTIYSNPFLFWYVQHLNESPRLLLKSFTDNKRTEHQGFHATLHKSSSSFHLQKSSAQLSDSALYYCAFDTNTYKVIFGKGTHLHVLPNTRIQNPDPAVYQLRDSKSSDKSVCLFTDFDSQTNVSQSKDSDVYITDKTVLDMRSMDFKSNSAVAWSNKSDFACANAFNNSIIPEDTFFPSPESSCGTQSFGLLDPKLCYLLDGILFIYGVILTALFLRSKRSRLLHSDYMNMTPRRPGPTRKHYQPYAPPRDFAAYRSRVKFSRSADAPAYQQGQNQLYNELNLGRREEYDVLDKRRGRDPEMGGKPQRRKNPQEGLYNELQKDKMAEAYSEIGMKGERRRGKGHDGLYQGLSTATKDTYDALHMQALPPR

SEQ ID NO: 10563 - protein, 854 aa, -Artificial-Sequence
MALPVTALLLPLALLLHAARPEFLVDMKVTQMPRYLIKRMGENVLLECGQDMSHETMYWYRQDPGLGLQLIYISYDVDSNSEGDIPKGYRVSRKKREHFSLILDSAKTNQTSVYFCASSSTNTEVFFGKGTRLTVLLEDLKNVFPPEVAVFEPSEAEISHTQKATLVCLATGFYPDHVELSWWVNGKEVHSGVSTDPQPLKEQPALNDSRYCLSSRLRVSATFWQNPRNHFRCQVQFYGLSENDEWTQDRAKPVTQIVSAEAWGRADCGSQSFGLLDPKLCYLLDGILFIYGVILTALFLRVKFSRSADAPAYQQGQNQLYNELNLGRREEYDVLDKRRGRDPEMGGKPQRRKNPQEGLYNELQKDKMAEAYSEIGMKGERRRGKGHDGLYQGLSTATKDTYDALHMQALPPRRAKRSGSGATNFSLLKQAGDVEENPGPTSMDWIWRILFLVGAATGAHSFEDGDSVTQTEGLVTLTEGLPVMLNCTYQTIYSNPFLFWYVQHLNESPRLLLKSFTDNKRTEHQGFHATLHKSSSSFHLQKSSAQLSDSALYYCAFDTNTYKVIFGKGTHLHVLPNTRIQNPDPAVYQLRDSKSSDKSVCLFTDFDSQTNVSQSKDSDVYITDKTVLDMRSMDFKSNSAVAWSNKSDFACANAFNNSIIPEDTFFPSPESSCGTQSFGLLDPKLCYLLDGILFIYGVILTALFLRDQRLPPDAHKPPGGGSFRTPIQEEQADAHSTLAKIRVKFSRSADAPAYQQGQNQLYNELNLGRREEYDVLDKRRGRDPEMGGKPQRRKNPQEGLYNELQKDKMAEAYSEIGMKGERRRGKGHDGLYQGLSTATKDTYDALHMQALPPR

SEQ ID NO: 10564 - protein, 938 aa, -Artificial-Sequence
MALPVTALLLPLALLLHAARPEFLVDMKVTQMPRYLIKRMGENVLLECGQDMSHETMYWYRQDPGLGLQLIYISYDVDSNSEGDIPKGYRVSRKKREHFSLILDSAKTNQTSVYFCASSSTNTEVFFGKGTRLTVLLEDLKNVFPPEVAVFEPSEAEISHTQKATLVCLATGFYPDHVELSWWVNGKEVHSGVSTDPQPLKEQPALNDSRYCLSSRLRVSATFWQNPRNHFRCQVQFYGLSENDEWTQDRAKPVTQIVSAEAWGRADCGSQSFGLLDPKLCYLLDGILFIYGVILTALFLRVKFSRSADAPAYQQGQNQLYNELNLGRREEYDVLDKRRGRDPEMGGKPQRRKNPQEGLYNELQKDKMAEAYSEIGMKGERRRGKGHDGLYQGLSTATKDTYDALHMQALPPRRAKRSGSGATNFSLLKQAGDVEENPGPTSMDWIWRILFLVGAATGAHSFEDGDSVTQTEGLVTLTEGLPVMLNCTYQTIYSNPFLFWYVQHLNESPRLLLKSFTDNKRTEHQGFHATLHKSSSSFHLQKSSAQLSDSALYYCAFDTNTYKVIFGKGTHLHVLPNTRIQNPDPAVYQLRDSKSSDKSVCLFTDFDSQTNVSQSKDSDVYITDKTVLDMRSMDFKSNSAVAWSNKSDFACANAFNNSIIPEDTFFPSPESSCGTQSFGLLDPKLCYLLDGILFIYGVILTALFLWRRKRKEKQSETSPKEFLTIYEDVKDLKTRRNHEQEQTFPGGGSTIYSMIQSQSSAPTSQEPAYTLYSLIQPSRKSGSRKRNHSPSFNSTIYEVIGKSQPKAQNPARLSRKELENFDVYSRVKFSRSADAPAYQQGQNQLYNELNLGRREEYDVLDKRRGRDPEMGGKPQRRKNPQEGLYNELQKDKMAEAYSEIGMKGERRRGKGHDGLYQGLSTATKDTYDALHMQALPPR

SEQ ID NO: 10565 - protein, 901 aa, -Artificial-Sequence
MALPVTALLLPLALLLHAARPEFLVDMKVTQMPRYLIKRMGENVLLECGQDMSHETMYWYRQDPGLGLQLIYISYDVDSNSEGDIPKGYRVSRKKREHFSLILDSAKTNQTSVYFCASSSTNTEVFFGKGTRLTVLLEDLKNVFPPEVAVFEPSEAEISHTQKATLVCLATGFYPDHVELSWWVNGKEVHSGVSTDPQPLKEQPALNDSRYCLSSRLRVSATFWQNPRNHFRCQVQFYGLSENDEWTQDRAKPVTQIVSAEAWGRADCGSQSFGLLDPKLCYLLDGILFIYGVILTALFLRSKRSRLLHSDYMNMTPRRPGPTRKHYQPYAPPRDFAAYRSRVKFSRSADAPAYQQGQNQLYNELNLGRREEYDVLDKRRGRDPEMGGKPQRRKNPQEGLYNELQKDKMAEAYSEIGMKGERRRGKGHDGLYQGLSTATKDTYDALHMQALPPRRAKRSGSGATNFSLLKQAGDVEENPGPTSMDWIWRILFLVGAATGAHSFEDGDSVTQTEGLVTLTEGLPVMLNCTYQTIYSNPFLFWYVQHLNESPRLLLKSFTDNKRTEHQGFHATLHKSSSSFHLQKSSAQLSDSALYYCAFDTNTYKVIFGKGTHLHVLPNTRIQNPDPAVYQLRDSKSSDKSVCLFTDFDSQTNVSQSKDSDVYITDKTVLDMRSMDFKSNSAVAWSNKSDFACANAFNNSIIPEDTFFPSPESSCGTQSFGLLDPKLCYLLDGILFIYGVILTALFLKRGRKKLLYIFKQPFMRPVQTTQEEDGCSCRFPEEEEGGCELRVKFSRSADAPAYQQGQNQLYNELNLGRREEYDVLDKRRGRDPEMGGKPQRRKNPQEGLYNELQKDKMAEAYSEIGMKGERRRGKGHDGLYQGLSTATKDTYDALHMQALPPR

SEQ ID NO: 10566 - protein, 900 aa, -Artificial-Sequence
MALPVTALLLPLALLLHAARPEFLVDMKVTQMPRYLIKRMGENVLLECGQDMSHETMYWYRQDPGLGLQLIYISYDVDSNSEGDIPKGYRVSRKKREHFSLILDSAKTNQTSVYFCASSSTNTEVFFGKGTRLTVLLEDLKNVFPPEVAVFEPSEAEISHTQKATLVCLATGFYPDHVELSWWVNGKEVHSGVSTDPQPLKEQPALNDSRYCLSSRLRVSATFWQNPRNHFRCQVQFYGLSENDEWTQDRAKPVTQIVSAEAWGRADCGSQSFGLLDPKLCYLLDGILFIYGVILTALFLRSKRSRLLHSDYMNMTPRRPGPTRKHYQPYAPPRDFAAYRSRVKFSRSADAPAYQQGQNQLYNELNLGRREEYDVLDKRRGRDPEMGGKPQRRKNPQEGLYNELQKDKMAEAYSEIGMKGERRRGKGHDGLYQGLSTATKDTYDALHMQALPPRRAKRSGSGATNFSLLKQAGDVEENPGPTSMDWIWRILFLVGAATGAHSFEDGDSVTQTEGLVTLTEGLPVMLNCTYQTIYSNPFLFWYVQHLNESPRLLLKSFTDNKRTEHQGFHATLHKSSSSFHLQKSSAQLSDSALYYCAFDTNTYKVIFGKGTHLHVLPNTRIQNPDPAVYQLRDSKSSDKSVCLFTDFDSQTNVSQSKDSDVYITDKTVLDMRSMDFKSNSAVAWSNKSDFACANAFNNSIIPEDTFFPSPESSCGTQSFGLLDPKLCYLLDGILFIYGVILTALFLRSKRSRLLHSDYMNMTPRRPGPTRKHYQPYAPPRDFAAYRSRVKFSRSADAPAYQQGQNQLYNELNLGRREEYDVLDKRRGRDPEMGGKPQRRKNPQEGLYNELQKDKMAEAYSEIGMKGERRRGKGHDGLYQGLSTATKDTYDALHMQALPPR

SEQ ID NO: 10567 - protein, 901 aa, -Artificial-Sequence; identical to SEQ ID NO: 10565

SEQ ID NO: 10568 - protein, 818 aa, -Artificial-Sequence
MALPVTALLLPLALLLHAARPEFLVDMKVTQMPRYLIKRMGENVLLECGQDMSHETMYWYRQDPGLGLQLIYISYDVDSNSEGDIPKGYRVSRKKREHFSLILDSAKTNQTSVYFCASSSTNTEVFFGKGTRLTVLLEDLKNVFPPEVAVFEPSEAEISHTQKATLVCLATGFYPDHVELSWWVNGKEVHSGVSTDPQPLKEQPALNDSRYCLSSRLRVSATFWQNPRNHFRCQVQFYGLSENDEWTQDRAKPVTQIVSAEAWGRADCGSQSFGLLDPKLCYLLDGILFIYGVILTALFLRVKFSRSADAPAYQQGQNQLYNELNLGRREEYDVLDKRRGRDPEMGGKPQRRKNPQEGLFNELQKDKMAEAFSEIGMKGERRRGKGHDGLFQGLSTATKDTFDALHMQALPPRRAKRSGSGATNFSLLKQAGDVEENPGPTSMDWIWRILFLVGAATGAHSFEDGDSVTQTEGLVTLTEGLPVMLNCTYQTIYSNPFLFWYVQHLNESPRLLLKSFTDNKRTEHQGFHATLHKSSSSFHLQKSSAQLSDSALYYCAFDTNTYKVIFGKGTHLHVLPNTRIQNPDPAVYQLRDSKSSDKSVCLFTDFDSQTNVSQSKDSDVYITDKTVLDMRSMDFKSNSAVAWSNKSDFACANAFNNSIIPEDTFFPSPESSCGTQSFGLLDPKLCYLLDGILFIYGVILTALFLRVKFSRSADAPAYQQGQNQLYNELNLGRREEYDVLDKRRGRDPEMGGKPQRRKNPQEGLYNELQKDKMAEAYSEIGMKGERRRGKGHDGLYQGLSTATKDTYDALHMQALPPR

SEQ ID NO: 10569 - protein, 818 aa, -Artificial-Sequence; identical to SEQ ID NO: 10568

SEQ ID NO: 10570 - protein, 860 aa, -Artificial-Sequence
MALPVTALLLPLALLLHAARPEFLVDMKVTQMPRYLIKRMGENVLLECGQDMSHETMYWYRQDPGLGLQLIYISYDVDSNSEGDIPKGYRVSRKKREHFSLILDSAKTNQTSVYFCASSSTNTEVFFGKGTRLTVLLEDLKNVFPPEVAVFEPSEAEISHTQKATLVCLATGFYPDHVELSWWVNGKEVHSGVSTDPQPLKEQPALNDSRYCLSSRLRVSATFWQNPRNHFRCQVQFYGLSENDEWTQDRAKPVTQIVSAEAWGRADCGSQSFGLLDPKLCYLLDGILFIYGVILTALFLRVKFSRSADAPAYQQGQNQLYNELNLGRREEYDVLDKRRGRDPEMGGKPQRRKNPQEGLFNELQKDKMAEAFSEIGMKGERRRGKGHDGLFQGLSTATKDTFDALHMQALPPRRAKRSGSGATNFSLLKQAGDVEENPGPTSMDWIWRILFLVGAATGAHSFEDGDSVTQTEGLVTLTEGLPVMLNCTYQTIYSNPFLFWYVQHLNESPRLLLKSFTDNKRTEHQGFHATLHKSSSSFHLQKSSAQLSDSALYYCAFDTNTYKVIFGKGTHLHVLPNTRIQNPDPAVYQLRDSKSSDKSVCLFTDFDSQTNVSQSKDSDVYITDKTVLDMRSMDFKSNSAVAWSNKSDFACANAFNNSIIPEDTFFPSPESSCGTQSFGLLDPKLCYLLDGILFIYGVILTALFLKRGRKKLLYIFKQPFMRPVQTTQEEDGCSCRFPEEEEGGCELRVKFSRSADAPAYQQGQNQLYNELNLGRREEYDVLDKRRGRDPEMGGKPQRRKNPQEGLYNELQKDKMAEAYSEIGMKGERRRGKGHDGLYQGLSTATKDTYDALHMQALPPR

SEQ ID NO: 10571 - protein, 859 aa, -Artificial-Sequence
MALPVTALLLPLALLLHAARPEFLVDMKVTQMPRYLIKRMGENVLLECGQDMSHETMYWYRQDPGLGLQLIYISYDVDSNSEGDIPKGYRVSRKKREHFSLILDSAKTNQTSVYFCASSSTNTEVFFGKGTRLTVLLEDLKNVFPPEVAVFEPSEAEISHTQKATLVCLATGFYPDHVELSWWVNGKEVHSGVSTDPQPLKEQPALNDSRYCLSSRLRVSATFWQNPRNHFRCQVQFYGLSENDEWTQDRAKPVTQIVSAEAWGRADCGSQSFGLLDPKLCYLLDGILFIYGVILTALFLRVKFSRSADAPAYQQGQNQLYNELNLGRREEYDVLDKRRGRDPEMGGKPQRRKNPQEGLFNELQKDKMAEAFSEIGMKGERRRGKGHDGLFQGLSTATKDTFDALHMQALPPRRAKRSGSGATNFSLLKQAGDVEENPGPTSMDWIWRILFLVGAATGAHSFEDGDSVTQTEGLVTLTEGLPVMLNCTYQTIYSNPFLFWYVQHLNESPRLLLKSFTDNKRTEHQGFHATLHKSSSSFHLQKSSAQLSDSALYYCAFDTNTYKVIFGKGTHLHVLPNTRIQNPDPAVYQLRDSKSSDKSVCLFTDFDSQTNVSQSKDSDVYITDKTVLDMRSMDFKSNSAVAWSNKSDFACANAFNNSIIPEDTFFPSPESSCGTQSFGLLDPKLCYLLDGILFIYGVILTALFLRSKRSRLLHSDYMNMTPRRPGPTRKHYQPYAPPRDFAAYRSRVKFSRSADAPAYQQGQNQLYNELNLGRREEYDVLDKRRGRDPEMGGKPQRRKNPQEGLYNELQKDKMAEAYSEIGMKGERRRGKGHDGLYQGLSTATKDTYDALHMQALPPR

SEQ ID NO: 10572 - protein, 854 aa, -Artificial-Sequence
MALPVTALLLPLALLLHAARPEFLVDMKVTQMPRYLIKRMGENVLLECGQDMSHETMYWYRQDPGLGLQLIYISYDVDSNSEGDIPKGYRVSRKKREHFSLILDSAKTNQTSVYFCASSSTNTEVFFGKGTRLTVLLEDLKNVFPPEVAVFEPSEAEISHTQKATLVCLATGFYPDHVELSWWVNGKEVHSGVSTDPQPLKEQPALNDSRYCLSSRLRVSATFWQNPRNHFRCQVQFYGLSENDEWTQDRAKPVTQIVSAEAWGRADCGSQSFGLLDPKLCYLLDGILFIYGVILTALFLRVKFSRSADAPAYQQGQNQLYNELNLGRREEYDVLDKRRGRDPEMGGKPQRRKNPQEGLFNELQKDKMAEAFSEIGMKGERRRGKGHDGLFQGLSTATKDTFDALHMQALPPRRAKRSGSGATNFSLLKQAGDVEENPGPTSMDWIWRILFLVGAATGAHSFEDGDSVTQTEGLVTLTEGLPVMLNCTYQTIYSNPFLFWYVQHLNESPRLLLKSFTDNKRTEHQGFHATLHKSSSSFHLQKSSAQLSDSALYYCAFDTNTYKVIFGKGTHLHVLPNTRIQNPDPAVYQLRDSKSSDKSVCLFTDFDSQTNVSQSKDSDVYITDKTVLDMRSMDFKSNSAVAWSNKSDFACANAFNNSIIPEDTFFPSPESSCGTQSFGLLDPKLCYLLDGILFIYGVILTALFLRDQRLPPDAHKPPGGGSFRTPIQEEQADAHSTLAKIRVKFSRSADAPAYQQGQNQLYNELNLGRREEYDVLDKRRGRDPEMGGKPQRRKNPQEGLYNELQKDKMAEAYSEIGMKGERRRGKGHDGLYQGLSTATKDTYDALHMQALPPR

SEQ ID NO: 10573 - protein, 938 aa, -Artificial-Sequence
MALPVTALLLPLALLLHAARPEFLVDMKVTQMPRYLIKRMGENVLLECGQDMSHETMYWYRQDPGLGLQLIYISYDVDSNSEGDIPKGYRVSRKKREHFSLILDSAKTNQTSVYFCASSSTNTEVFFGKGTRLTVLLEDLKNVFPPEVAVFEPSEAEISHTQKATLVCLATGFYPDHVELSWWVNGKEVHSGVSTDPQPLKEQPALNDSRYCLSSRLRVSATFWQNPRNHFRCQVQFYGLSENDEWTQDRAKPVTQIVSAEAWGRADCGSQSFGLLDPKLCYLLDGILFIYGVILTALFLRVKFSRSADAPAYQQGQNQLYNELNLGRREEYDVLDKRRGRDPEMGGKPQRRKNPQEGLFNELQKDKMAEAFSEIGMKGERRRGKGHDGLFQGLSTATKDTFDALHMQALPPRRAKRSGSGATNFSLLKQAGDVEENPGPTSMDWIWRILFLVGAATGAHSFEDGDSVTQTEGLVTLTEGLPVMLNCTYQTIYSNPFLFWYVQHLNESPRLLLKSFTDNKRTEHQGFHATLHKSSSSFHLQKSSAQLSDSALYYCAFDTNTYKVIFGKGTHLHVLPNTRIQNPDPAVYQLRDSKSSDKSVCLFTDFDSQTNVSQSKDSDVYITDKTVLDMRSMDFKSNSAVAWSNKSDFACANAFNNSIIPEDTFFPSPESSCGTQSFGLLDPKLCYLLDGILFIYGVILTALFLWRRKRKEKQSETSPKEFLTIYEDVKDLKTRRNHEQEQTFPGGGSTIYSMIQSQSSAPTSQEPAYTLYSLIQPSRKSGSRKRNHSPSFNSTIYEVIGKSQPKAQNPARLSRKELENFDVYSRVKFSRSADAPAYQQGQNQLYNELNLGRREEYDVLDKRRGRDPEMGGKPQRRKNPQEGLYNELQKDKMAEAYSEIGMKGERRRGKGHDGLYQGLSTATKDTYDALHMQALPPR

SEQ ID NO: 10574 - protein, 859 aa, -Artificial-Sequence; identical to SEQ ID NO: 10571

SEQ ID NO: 10575 - protein, 860 aa, -Artificial-Sequence; identical to SEQ ID NO: 10570

SEQ ID NO: 10576 - protein, 818 aa, -Artificial-Sequence
MALPVTALLLPLALLLHAARPEFLVDMKVTQMPRYLIKRMGENVLLECGQDMSHETMYWYRQDPGLGLQLIYISYDVDSNSEGDIPKGYRVSRKKREHFSLILDSAKTNQTSVYFCASSSTNTEVFFGKGTRLTVLLEDLKNVFPPEVAVFEPSEAEISHTQKATLVCLATGFYPDHVELSWWVNGKEVHSGVSTDPQPLKEQPALNDSRYCLSSRLRVSATFWQNPRNHFRCQVQFYGLSENDEWTQDRAKPVTQIVSAEAWGRADCGSQSFGLLDPKLCYLLDGILFIYGVILTALFLRVKFSRSADAPAYQQGQNQLYNELNLGRREEYDVLDKRRGRDPEMGGKPQRRKNPQEGLFNELQKDKMAEAFSEIGMKGERRRGKGHDGLFQGLSTATKDTFDALHMQALPPRRAKRSGSGATNFSLLKQAGDVEENPGPTSMDWIWRILFLVGAATGAHSFEDGDSVTQTEGLVTLTEGLPVMLNCTYQTIYSNPFLFWYVQHLNESPRLLLKSFTDNKRTEHQGFHATLHKSSSSFHLQKSSAQLSDSALYYCAFDTNTYKVIFGKGTHLHVLPNTRIQNPDPAVYQLRDSKSSDKSVCLFTDFDSQTNVSQSKDSDVYITDKTVLDMRSMDFKSNSAVAWSNKSDFACANAFNNSIIPEDTFFPSPESSCGTQSFGLLDPKLSYLLDGILFIYGVILTALFLRVKFSRSADAPAYQQGQNQLYNELNLGRREEYDVLDKRRGRDPEMGGKPQRRKNPQEGLYNELQKDKMAEAYSEIGMKGERRRGKGHDGLYQGLSTATKDTYDALHMQALPPR

SEQ ID NO: 10577 - protein, 818 aa, -Artificial-Sequence; identical to SEQ ID NO: 10576

SEQ ID NO: 10578 - protein, 818 aa, -Artificial-Sequence
MALPVTALLLPLALLLHAARPEFLVDMKVTQMPRYLIKRMGENVLLECGQDMSHETMYWYRQDPGLGLQLIYISYDVDSNSEGDIPKGYRVSRKKREHFSLILDSAKTNQTSVYFCASSSTNTEVFFGKGTRLTVLLEDLKNVFPPEVAVFEPSEAEISHTQKATLVCLATGFYPDHVELSWWVNGKEVHSGVSTDPQPLKEQPALNDSRYCLSSRLRVSATFWQNPRNHFRCQVQFYGLSENDEWTQDRAKPVTQIVSAEAWGRADCGSQSFGLLDPKLSYLLDGILFIYGVILTALFLRVKFSRSADAPAYQQGQNQLYNELNLGRREEYDVLDKRRGRDPEMGGKPQRRKNPQEGLYNELQKDKMAEAYSEIGMKGERRRGKGHDGLYQGLSTATKDTYDALHMQALPPRRAKRSGSGATNFSLLKQAGDVEENPGPTSMDWIWRILFLVGAATGAHSFEDGDSVTQTEGLVTLTEGLPVMLNCTYQTIYSNPFLFWYVQHLNESPRLLLKSFTDNKRTEHQGFHATLHKSSSSFHLQKSSAQLSDSALYYCAFDTNTYKVIFGKGTHLHVLPNTRIQNPDPAVYQLRDSKSSDKSVCLFTDFDSQTNVSQSKDSDVYITDKTVLDMRSMDFKSNSAVAWSNKSDFACANAFNNSIIPEDTFFPSPESSCGTQSFGLLDPKLSYLLDGILFIYGVILTALFLRVKFSRSADAPAYQQGQNQLYNELNLGRREEYDVLDKRRGRDPEMGGKPQRRKNPQEGLYNELQKDKMAEAYSEIGMKGERRRGKGHDGLYQGLSTATKDTYDALHMQALPPR

SEQ ID NO: 10579 - protein, 722 aa, -Artificial-Sequence
MALPVTALLLPLALLLHAARPEFLVDMKVTQMPRYLIKRMGENVLLECGQDMSHETMYWYRQDPGLGLQLIYISYDVDSNSEGDIPKGYRVSRKKREHFSLILDSAKTNQTSVYFCASSSTNTEVFFGKGTRLTVLLEDLKNVFPPEVAVFEPSEAEISHTQKATLVCLATGFYPDHVELSWWVNGKEVHSGVSTDPQPLKEQPALNDSRYCLSSRLRVSATFWQNPRNHFRCQVQFYGLSENDEWTQDRAKPVTQIVSAEAWGRADCGSTTPGERSSLPAFYPGTSGSCSGCGSLSLPLLAGLVAADAVASLLIVGAVFLCARPRRSPAQEDGKVYINMPGRGRAKRSGSGATNFSLLKQAGDVEENPGPTSMDWIWRILFLVGAATGAHSFEDGDSVTQTEGLVTLTEGLPVMLNCTYQTIYSNPFLFWYVQHLNESPRLLLKSFTDNKRTEHQGFHATLHKSSSSFHLQKSSAQLSDSALYYCAFDTNTYKVIFGKGTHLHVLPNTRIQNPDPAVYQLRDSKSSDKSVCLFTDFDSQTNVSQSKDSDVYITDKTVLDMRSMDFKSNSAVAWSNKSDFACANAFNNSIIPEDTFFPSPESSCGTTTPGERSSLPAFYPGTSGSCSGCGSLSLPLLAGLVAADAVASLLIVGAVFKRGRKKLLYIFKQPFMRPVQTTQEEDGCSCRFPEEEEGGCELLCARPRRSPAQEDGKVYINMPGRG

SEQ ID NO: 10580 - protein, 721 aa, -Artificial-Sequence
MALPVTALLLPLALLLHAARPEFLVDMKVTQMPRYLIKRMGENVLLECGQDMSHETMYWYRQDPGLGLQLIYISYDVDSNSEGDIPKGYRVSRKKREHFSLILDSAKTNQTSVYFCASSSTNTEVFFGKGTRLTVLLEDLKNVFPPEVAVFEPSEAEISHTQKATLVCLATGFYPDHVELSWWVNGKEVHSGVSTDPQPLKEQPALNDSRYCLSSRLRVSATFWQNPRNHFRCQVQFYGLSENDEWTQDRAKPVTQIVSAEAWGRADCGSTTPGERSSLPAFYPGTSGSCSGCGSLSLPLLAGLVAADAVASLLIVGAVFLCARPRRSPAQEDGKVYINMPGRGRAKRSGSGATNFSLLKQAGDVEENPGPTSMDWIWRILFLVGAATGAHSFEDGDSVTQTEGLVTLTEGLPVMLNCTYQTIYSNPFLFWYVQHLNESPRLLLKSFTDNKRTEHQGFHATLHKSSSSFHLQKSSAQLSDSALYYCAFDTNTYKVIFGKGTHLHVLPNTRIQNPDPAVYQLRDSKSSDKSVCLFTDFDSQTNVSQSKDSDVYITDKTVLDMRSMDFKSNSAVAWSNKSDFACANAFNNSIIPEDTFFPSPESSCGTTTPGERSSLPAFYPGTSGSCSGCGSLSLPLLAGLVAADAVASLLIVGAVFRSKRSRLLHSDYMNMTPRRPGPTRKHYQPYAPPRDFAAYRSLCARPRRSPAQEDGKVYINMPGRG

SEQ ID NO: 10581 - protein, 716 aa, -Artificial-Sequence
MALPVTALLLPLALLLHAARPEFLVDMKVTQMPRYLIKRMGENVLLECGQDMSHETMYWYRQDPGLGLQLIYISYDVDSNSEGDIPKGYRVSRKKREHFSLILDSAKTNQTSVYFCASSSTNTEVFFGKGTRLTVLLEDLKNVFPPEVAVFEPSEAEISHTQKATLVCLATGFYPDHVELSWWVNGKEVHSGVSTDPQPLKEQPALNDSRYCLSSRLRVSATFWQNPRNHFRCQVQFYGLSENDEWTQDRAKPVTQIVSAEAWGRADCGSTTPGERSSLPAFYPGTSGSCSGCGSLSLPLLAGLVAADAVASLLIVGAVFLCARPRRSPAQEDGKVYINMPGRGRAKRSGSGATNFSLLKQAGDVEENPGPTSMDWIWRILFLVGAATGAHSFEDGDSVTQTEGLVTLTEGLPVMLNCTYQTIYSNPFLFWYVQHLNESPRLLLKSFTDNKRTEHQGFHATLHKSSSSFHLQKSSAQLSDSALYYCAFDTNTYKVIFGKGTHLHVLPNTRIQNPDPAVYQLRDSKSSDKSVCLFTDFDSQTNVSQSKDSDVYITDKTVLDMRSMDFKSNSAVAWSNKSDFACANAFNNSIIPEDTFFPSPESSCGTTTPGERSSLPAFYPGTSGSCSGCGSLSLPLLAGLVAADAVASLLIVGAVFRDQRLPPDAHKPPGGGSFRTPIQEEQADAHSTLAKILCARPRRSPAQEDGKVYINMPGRG

SEQ ID NO: 10582 - protein, 800 aa, -Artificial-Sequence
MALPVTALLLPLALLLHAARPEFLVDMKVTQMPRYLIKRMGENVLLECGQDMSHETMYWYRQDPGLGLQLIYISYDVDSNSEGDIPKGYRVSRKKREHFSLILDSAKTNQTSVYFCASSSTNTEVFFGKGTRLTVLLEDLKNVFPPEVAVFEPSEAEISHTQKATLVCLATGFYPDHVELSWWVNGKEVHSGVSTDPQPLKEQPALNDSRYCLSSRLRVSATFWQNPRNHFRCQVQFYGLSENDEWTQDRAKPVTQIVSAEAWGRADCGSTTPGERSSLPAFYPGTSGSCSGCGSLSLPLLAGLVAADAVASLLIVGAVFLCARPRRSPAQEDGKVYINMPGRGRAKRSGSGATNFSLLKQAGDVEENPGPTSMDWIWRILFLVGAATGAHSFEDGDSVTQTEGLVTLTEGLPVMLNCTYQTIYSNPFLFWYVQHLNESPRLLLKSFTDNKRTEHQGFHATLHKSSSSFHLQKSSAQLSDSALYYCAFDTNTYKVIFGKGTHLHVLPNTRIQNPDPAVYQLRDSKSSDKSVCLFTDFDSQTNVSQSKDSDVYITDKTVLDMRSMDFKSNSAVAWSNKSDFACANAFNNSIIPEDTFFPSPESSCGTTTPGERSSLPAFYPGTSGSCSGCGSLSLPLLAGLVAADAVASLLIVGAVFWRRKRKEKQSETSPKEFLTIYEDVKDLKTRRNHEQEQTFPGGGSTIYSMIQSQSSAPTSQEPAYTLYSLIQPSRKSGSRKRNHSPSFNSTIYEVIGKSQPKAQNPARLSRKELENFDVYSLCARPRRSPAQEDGKVYINMPGRG

SEQ ID NO: 10583 - protein, 751 aa, -Artificial-Sequence
MALPVTALLLPLALLLHAARPEFLVDMKVTQMPRYLIKRMGENVLLECGQDMSHETMYWYRQDPGLGLQLIYISYDVDSNSEGDIPKGYRVSRKKREHFSLILDSAKTNQTSVYFCASSSTNTEVFFGKGTRLTVLLEDLKNVFPPEVAVFEPSEAEISHTQKATLVCLATGFYPDHVELSWWVNGKEVHSGVSTDPQPLKEQPALNDSRYCLSSRLRVSATFWQNPRNHFRCQVQFYGLSENDEWTQDRAKPVTQIVSAEAWGRADCGSLGEPQLCYILDAILFLYGIVLTLLYCKRGRKKLLYIFKQPFMRPVQTTQEEDGCSCRFPEEEEGGCELRLKIQVRKAAITSYEKSDGVYTGLSTRNQETYETLKHEKPPQRAKRSGSGATNFSLLKQAGDVEENPGPTSMDWIWRILFLVGAATGAHSFEDGDSVTQTEGLVTLTEGLPVMLNCTYQTIYSNPFLFWYVQHLNESPRLLLKSFTDNKRTEHQGFHATLHKSSSSFHLQKSSAQLSDSALYYCAFDTNTYKVIFGKGTHLHVLPNTRIQNPDPAVYQLRDSKSSDKSVCLFTDFDSQTNVSQSKDSDVYITDKTVLDMRSMDFKSNSAVAWSNKSDFACANAFNNSIIPEDTFFPSPESSCGTLGEPQLCYILDAILFLYGIVLTLLYCRSKRSRLLHSDYMNMTPRRPGPTRKHYQPYAPPRDFAAYRSRLKIQVRKAAITSYEKSDGVYTGLSTRNQETYETLKHEKPPQ

SEQ ID NO: 10584 - protein, 746 aa, -Artificial-Sequence
MALPVTALLLPLALLLHAARPEFLVDMKVTQMPRYLIKRMGENVLLECGQDMSHETMYWYRQDPGLGLQLIYISYDVDSNSEGDIPKGYRVSRKKREHFSLILDSAKTNQTSVYFCASSSTNTEVFFGKGTRLTVLLEDLKNVFPPEVAVFEPSEAEISHTQKATLVCLATGFYPDHVELSWWVNGKEVHSGVSTDPQPLKEQPALNDSRYCLSSRLRVSATFWQNPRNHFRCQVQFYGLSENDEWTQDRAKPVTQIVSAEAWGRADCGSLGEPQLCYILDAILFLYGIVLTLLYCKRGRKKLLYIFKQPFMRPVQTTQEEDGCSCRFPEEEEGGCELRLKIQVRKAAITSYEKSDGVYTGLSTRNQETYETLKHEKPPQRAKRSGSGATNFSLLKQAGDVEENPGPTSMDWIWRILFLVGAATGAHSFEDGDSVTQTEGLVTLTEGLPVMLNCTYQTIYSNPFLFWYVQHLNESPRLLLKSFTDNKRTEHQGFHATLHKSSSSFHLQKSSAQLSDSALYYCAFDTNTYKVIFGKGTHLHVLPNTRIQNPDPAVYQLRDSKSSDKSVCLFTDFDSQTNVSQSKDSDVYITDKTVLDMRSMDFKSNSAVAWSNKSDFACANAFNNSIIPEDTFFPSPESSCGTLGEPQLCYILDAILFLYGIVLTLLYCRDQRLPPDAHKPPGGGSFRTPIQEEQADAHSTLAKIRLKIQVRKAAITSYEKSDGVYTGLSTRNQETYETLKHEKPPQ

SEQ ID NO: 10585 - protein, 830 aa, -Artificial-Sequence
MALPVTALLLPLALLLHAARPEFLVDMKVTQMPRYLIKRMGENVLLECGQDMSHETMYWYRQDPGLGLQLIYISYDVDSNSEGDIPKGYRVSRKKREHFSLILDSAKTNQTSVYFCASSSTNTEVFFGKGTRLTVLLEDLKNVFPPEVAVFEPSEAEISHTQKATLVCLATGFYPDHVELSWWVNGKEVHSGVSTDPQPLKEQPALNDSRYCLSSRLRVSATFWQNPRNHFRCQVQFYGLSENDEWTQDRAKPVTQIVSAEAWGRADCGSLGEPQLCYILDAILFLYGIVLTLLYCKRGRKKLLYIFKQPFMRPVQTTQEEDGCSCRFPEEEEGGCELRLKIQVRKAAITSYEKSDGVYTGLSTRNQETYETLKHEKPPQRAKRSGSGATNFSLLKQAGDVEENPGPTSMDWIWRILFLVGAATGAHSFEDGDSVTQTEGLVTLTEGLPVMLNCTYQTIYSNPFLFWYVQHLNESPRLLLKSFTDNKRTEHQGFHATLHKSSSSFHLQKSSAQLSDSALYYCAFDTNTYKVIFGKGTHLHVLPNTRIQNPDPAVYQLRDSKSSDKSVCLFTDFDSQTNVSQSKDSDVYITDKTVLDMRSMDFKSNSAVAWSNKSDFACANAFNNSIIPEDTFFPSPESSCGTLGEPQLCYILDAILFLYGIVLTLLYCWRRKRKEKQSETSPKEFLTIYEDVKDLKTRRNHEQEQTFPGGGSTIYSMIQSQSSAPTSQEPAYTLYSLIQPSRKSGSRKRNHSPSFNSTIYEVIGKSQPKAQNPARLSRKELENFDVYSRLKIQVRKAAITSYEKSDGVYTGLSTRNQETYETLKHEKPPQ

SEQ ID NO: 10586 - protein, 752 aa, -Artificial-Sequence
MALPVTALLLPLALLLHAARPEFLVDMKVTQMPRYLIKRMGENVLLECGQDMSHETMYWYRQDPGLGLQLIYISYDVDSNSEGDIPKGYRVSRKKREHFSLILDSAKTNQTSVYFCASSSTNTEVFFGKGTRLTVLLEDLKNVFPPEVAVFEPSEAEISHTQKATLVCLATGFYPDHVELSWWVNGKEVHSGVSTDPQPLKEQPALNDSRYCLSSRLRVSATFWQNPRNHFRCQVQFYGLSENDEWTQDRAKPVTQIVSAEAWGRADCGSLGEPQLCYILDAILFLYGIVLTLLYCKRGRKKLLYIFKQPFMRPVQTTQEEDGCSCRFPEEEEGGCELRLKIQVRKAAITSYEKSDGVYTGLSTRNQETYETLKHEKPPQRAKRSGSGATNFSLLKQAGDVEENPGPTSMDWIWRILFLVGAATGAHSFEDGDSVTQTEGLVTLTEGLPVMLNCTYQTIYSNPFLFWYVQHLNESPRLLLKSFTDNKRTEHQGFHATLHKSSSSFHLQKSSAQLSDSALYYCAFDTNTYKVIFGKGTHLHVLPNTRIQNPDPAVYQLRDSKSSDKSVCLFTDFDSQTNVSQSKDSDVYITDKTVLDMRSMDFKSNSAVAWSNKSDFACANAFNNSIIPEDTFFPSPESSCGTLGEPQLCYILDAILFLYGIVLTLLYCKRGRKKLLYIFKQPFMRPVQTTQEEDGCSCRFPEEEEGGCELRLKIQVRKAAITSYEKSDGVYTGLSTRNQETYETLKHEKPPQ

SEQ ID NO: 10587 - protein, 751 aa, -Artificial-Sequence; identical to SEQ ID NO: 10583

SEQ ID NO: 10588 - protein, 750 aa, -Artificial-Sequence
MALPVTALLLPLALLLHAARPEFLVDMKVTQMPRYLIKRMGENVLLECGQDMSHETMYWYRQDPGLGLQLIYISYDVDSNSEGDIPKGYRVSRKKREHFSLILDSAKTNQTSVYFCASSSTNTEVFFGKGTRLTVLLEDLKNVFPPEVAVFEPSEAEISHTQKATLVCLATGFYPDHVELSWWVNGKEVHSGVSTDPQPLKEQPALNDSRYCLSSRLRVSATFWQNPRNHFRCQVQFYGLSENDEWTQDRAKPVTQIVSAEAWGRADCGSLGEPQLCYILDAILFLYGIVLTLLYCRSKRSRLLHSDYMNMTPRRPGPTRKHYQPYAPPRDFAAYRSRLKIQVRKAAITSYEKSDGVYTGLSTRNQETYETLKHEKPPQRAKRSGSGATNFSLLKQAGDVEENPGPTSMDWIWRILFLVGAATGAHSFEDGDSVTQTEGLVTLTEGLPVMLNCTYQTIYSNPFLFWYVQHLNESPRLLLKSFTDNKRTEHQGFHATLHKSSSSFHLQKSSAQLSDSALYYCAFDTNTYKVIFGKGTHLHVLPNTRIQNPDPAVYQLRDSKSSDKSVCLFTDFDSQTNVSQSKDSDVYITDKTVLDMRSMDFKSNSAVAWSNKSDFACANAFNNSIIPEDTFFPSPESSCGTLGEPQLCYILDAILFLYGIVLTLLYCRSKRSRLLHSDYMNMTPRRPGPTRKHYQPYAPPRDFAAYRSRLKIQVRKAAITSYEKSDGVYTGLSTRNQETYETLKHEKPPQ

SEQ ID NO: 10589 - protein, 668 aa, -Artificial-Sequence
MALPVTALLLPLALLLHAARPEFLVDMKVTQMPRYLIKRMGENVLLECGQDMSHETMYWYRQDPGLGLQLIYISYDVDSNSEGDIPKGYRVSRKKREHFSLILDSAKTNQTSVYFCASSSTNTEVFFGKGTRLTVLLEDLKNVFPPEVAVFEPSEAEISHTQKATLVCLATGFYPDHVELSWWVNGKEVHSGVSTDPQPLKEQPALNDSRYCLSSRLRVSATFWQNPRNHFRCQVQFYGLSENDEWTQDRAKPVTQIVSAEAWGRADCGSLGEPQLSYILDAILFLYGIVLTLLYCRLKIQVRKAAITSYEKSDGVYTGLSTRNQETYETLKHEKPPQRAKRSGSGATNFSLLKQAGDVEENPGPTSMDWIWRILFLVGAATGAHSFEDGDSVTQTEGLVTLTEGLPVMLNCTYQTIYSNPFLFWYVQHLNESPRLLLKSFTDNKRTEHQGFHATLHKSSSSFHLQKSSAQLSDSALYYCAFDTNTYKVIFGKGTHLHVLPNTRIQNPDPAVYQLRDSKSSDKSVCLFTDFDSQTNVSQSKDSDVYITDKTVLDMRSMDFKSNSAVAWSNKSDFACANAFNNSIIPEDTFFPSPESSCGTLGEPQLSYILDAILFLYGIVLTLLYCRLKIQVRKAAITSYEKSDGVYTGLSTRNQETYETLKHEKPPQ

SEQ ID NO: 10590 - protein, 704 aa, -Artificial-Sequence
MALPVTALLLPLALLLHAARPEFLVDMKVTQMPRYLIKRMGENVLLECGQDMSHETMYWYRQDPGLGLQLIYISYDVDSNSEGDIPKGYRVSRKKREHFSLILDSAKTNQTSVYFCASSSTNTEVFFGKGTRLTVLLEDLKNVFPPEVAVFEPSEAEISHTQKATLVCLATGFYPDHVELSWWVNGKEVHSGVSTDPQPLKEQPALNDSRYCLSSRLRVSATFWQNPRNHFRCQVQFYGLSENDEWTQDRAKPVTQIVSAEAWGRADCGSQAQSDCSCSTVSPGVLAGIVMGDLVLTVLIALAVYFLGRLVPRGRGAAEAATRKQRITETESPYQELQGQRSDVYSDLNTQRPYYKRAKRSGSGATNFSLLKQAGDVEENPGPTSMDWIWRILFLVGAATGAHSFEDGDSVTQTEGLVTLTEGLPVMLNCTYQTIYSNPFLFWYVQHLNESPRLLLKSFTDNKRTEHQGFHATLHKSSSSFHLQKSSAQLSDSALYYCAFDTNTYKVIFGKGTHLHVLPNTRIQNPDPAVYQLRDSKSSDKSVCLFTDFDSQTNVSQSKDSDVYITDKTVLDMRSMDFKSNSAVAWSNKSDFACANAFNNSIIPEDTFFPSPESSCGTQAQSDCSSSTVSPGVLAGIVMGDLVLTVLIALAVYFLGRLVPRGRGAAEAATRKQRITETESPYQELQGQRSDVYSDLNTQRPYYK

SEQ ID NO: 10591 - protein, 746 aa, -Artificial-Sequence
MALPVTALLLPLALLLHAARPEFLVDMKVTQMPRYLIKRMGENVLLECGQDMSHETMYWYRQDPGLGLQLIYISYDVDSNSEGDIPKGYRVSRKKREHFSLILDSAKTNQTSVYFCASSSTNTEVFFGKGTRLTVLLEDLKNVFPPEVAVFEPSEAEISHTQKATLVCLATGFYPDHVELSWWVNGKEVHSGVSTDPQPLKEQPALNDSRYCLSSRLRVSATFWQNPRNHFRCQVQFYGLSENDEWTQDRAKPVTQIVSAEAWGRADCGSQAQSDCSCSTVSPGVLAGIVMGDLVLTVLIALAVYFLGRLVPRGRGAAEAATRKQRITETESPYQELQGQRSDVYSDLNTQRPYYKRAKRSGSGATNFSLLKQAGDVEENPGPTSMDWIWRILFLVGAATGAHSFEDGDSVTQTEGLVTLTEGLPVMLNCTYQTIYSNPFLFWYVQHLNESPRLLLKSFTDNKRTEHQGFHATLHKSSSSFHLQKSSAQLSDSALYYCAFDTNTYKVIFGKGTHLHVLPNTRIQNPDPAVYQLRDSKSSDKSVCLFTDFDSQTNVSQSKDSDVYITDKTVLDMRSMDFKSNSAVAWSNKSDFACANAFNNSIIPEDTFFPSPESSCGTQAQSDCSCSTVSPGVLAGIVMGDLVLTVLIALAVYFLGRLVPRGRGAAEAATRKQRITETESPYQELQGQRSDVYSDLNTQKRGRKKLLYIFKQPFMRPVQTTQEEDGCSCRFPEEEEGGCELRPYYK

SEQ ID NO: 10592 - protein, 745 aa, -Artificial-Sequence
MALPVTALLLPLALLLHAARPEFLVDMKVTQMPRYLIKRMGENVLLECGQDMSHETMYWYRQDPGLGLQLIYISYDVDSNSEGDIPKGYRVSRKKREHFSLILDSAKTNQTSVYFCASSSTNTEVFFGKGTRLTVLLEDLKNVFPPEVAVFEPSEAEISHTQKATLVCLATGFYPDHVELSWWVNGKEVHSGVSTDPQPLKEQPALNDSRYCLSSRLRVSATFWQNPRNHFRCQVQFYGLSENDEWTQDRAKPVTQIVSAEAWGRADCGSQAQSDCSCSTVSPGVLAGIVMGDLVLTVLIALAVYFLGRLVPRGRGAAEAATRKQRITETESPYQELQGQRSDVYSDLNTQRPYYKRAKRSGSGATNFSLLKQAGDVEENPGPTSMDWIWRILFLVGAATGAHSFEDGDSVTQTEGLVTLTEGLPVMLNCTYQTIYSNPFLFWYVQHLNESPRLLLKSFTDNKRTEHQGFHATLHKSSSSFHLQKSSAQLSDSALYYCAFDTNTYKVIFGKGTHLHVLPNTRIQNPDPAVYQLRDSKSSDKSVCLFTDFDSQTNVSQSKDSDVYITDKTVLDMRSMDFKSNSAVAWSNKSDFACANAFNNSIIPEDTFFPSPESSCGTQAQSDCSCSTVSPGVLAGIVMGDLVLTVLIALAVYFLGRLVPRGRGAAEAATRKQRITETESPYQELQGQRSDVYSDLNTQRSKRSRLLHSDYMNMTPRRPGPTRKHYQPYAPPRDFAAYRSRPYYK

SEQ ID NO: 10593 - protein, 740 aa, -Artificial-Sequence
MALPVTALLLPLALLLHAARPEFLVDMKVTQMPRYLIKRMGENVLLECGQDMSHETMYWYRQDPGLGLQLIYISYDVDSNSEGDIPKGYRVSRKKREHFSLILDSAKTNQTSVYFCASSSTNTEVFFGKGTRLTVLLEDLKNVFPPEVAVFEPSEAEISHTQKATLVCLATGFYPDHVELSWWVNGKEVHSGVSTDPQPLKEQPALNDSRYCLSSRLRVSATFWQNPRNHFRCQVQFYGLSENDEWTQDRAKPVTQIVSAEAWGRADCGSQAQSDCSCSTVSPGVLAGIVMGDLVLTVLIALAVYFLGRLVPRGRGAAEAATRKQRITETESPYQELQGQRSDVYSDLNTQRPYYKRAKRSGSGATNFSLLKQAGDVEENPGPTSMDWIWRILFLVGAATGAHSFEDGDSVTQTEGLVTLTEGLPVMLNCTYQTIYSNPFLFWYVQHLNESPRLLLKSFTDNKRTEHQGFHATLHKSSSSFHLQKSSAQLSDSALYYCAFDTNTYKVIFGKGTHLHVLPNTRIQNPDPAVYQLRDSKSSDKSVCLFTDFDSQTNVSQSKDSDVYITDKTVLDMRSMDFKSNSAVAWSNKSDFACANAFNNSIIPEDTFFPSPESSCGTQAQSDCSCSTVSPGVLAGIVMGDLVLTVLIALAVYFLGRLVPRGRGAAEAATRKQRITETESPYQELQGQRSDVYSDLNTQRDQRLPPDAHKPPGGGSFRTPIQEEQADAHSTLAKIRPYYK

SEQ ID NO: 10594 - protein, 824 aa, -Artificial-Sequence
MALPVTALLLPLALLLHAARPEFLVDMKVTQMPRYLIKRMGENVLLECGQDMSHETMYWYRQDPGLGLQLIYISYDVDSNSEGDIPKGYRVSRKKREHFSLILDSAKTNQTSVYFCASSSTNTEVFFGKGTRLTVLLEDLKNVFPPEVAVFEPSEAEISHTQKATLVCLATGFYPDHVELSWWVNGKEVHSGVSTDPQPLKEQPALNDSRYCLSSRLRVSATFWQNPRNHFRCQVQFYGLSENDEWTQDRAKPVTQIVSAEAWGRADCGSQAQSDCSCSTVSPGVLAGIVMGDLVLTVLIALAVYFLGRLVPRGRGAAEAATRKQRITETESPYQELQGQRSDVYSDLNTQRPYYKRAKRSGSGATNFSLLKQAGDVEENPGPTSMDWIWRILFLVGAATGAHSFEDGDSVTQTEGLVTLTEGLPVMLNCTYQTIYSNPFLFWYVQHLNESPRLLLKSFTDNKRTEHQGFHATLHKSSSSFHLQKSSAQLSDSALYYCAFDTNTYKVIFGKGTHLHVLPNTRIQNPDPAVYQLRDSKSSDKSVCLFTDFDSQTNVSQSKDSDVYITDKTVLDMRSMDFKSNSAVAWSNKSDFACANAFNNSIIPEDTFFPSPESSCGTQAQSDCSCSTVSPGVLAGIVMGDLVLTVLIALAVYFLGRLVPRGRGAAEAATRKQRITETESPYQELQGQRSDVYSDLNTQWRRKRKEKQSETSPKEFLTIYEDVKDLKTRRNHEQEQTFPGGGSTIYSMIQSQSSAPTSQEPAYTLYSLIQPSRKSGSRKRNHSPSFNSTIYEVIGKSQPKAQNPARLSRKELENFDVYSRPYYK

SEQ ID NO: 10595 - protein, 916 aa, -Artificial-Sequence
MALPVTALLLPLALLLHAARPEFLVDMKVTQMPRYLIKRMGENVLLECGQDMSHETMYWYRQDPGLGLQLIYISYDVDSNSEGDIPKGYRVSRKKREHFSLILDSAKTNQTSVYFCASSSTNTEVFFGKGTRLTVLLEDLKNVFPPEVAVFEPSEAEISHTQKATLVCLATGFYPDHVELSWWVNGKEVHSGVSTDPQPLKEQPALNDSRYCLSSRLRVSATFWQNPRNHFRCQVQFYGLSENDEWTQDRAKPVTQIVSAEAWGRADCGSQAQSDCSCSTVSPGVLAGIVMGDLVLTVLIALAVYFLGRLVPRGRGAAEAATRKQRITETESPYQELQGQRSDVYSDLNTQRVKFSRSADAPAYQQGQNQLYNELNLGRREEYDVLDKRRGRDPEMGGKPQRRKNPQEGLYNELQKDKMAEAYSEIGMKGERRRGKGHDGLYQGLSTATKDTYDALHMQALPPRRAKRSGSGATNFSLLKQAGDVEENPGPTSMDWIWRILFLVGAATGAHSFEDGDSVTQTEGLVTLTEGLPVMLNCTYQTIYSNPFLFWYVQHLNESPRLLLKSFTDNKRTEHQGFHATLHKSSSSFHLQKSSAQLSDSALYYCAFDTNTYKVIFGKGTHLHVLPNTRIQNPDPAVYQLRDSKSSDKSVCLFTDFDSQTNVSQSKDSDVYITDKTVLDMRSMDFKSNSAVAWSNKSDFACANAFNNSIIPEDTFFPSPESSCGTTTPGERSSLPAFYPGTSGSCSGCGSLSLPLLAGLVAADAVASLLIVGAVFLCARPRRSPAQEDGKVYINMPGRGSSRRVKFSRSADAPAYQQGQNQLYNELNLGRREEYDVLDKRRGRDPEMGGKPQRRKNPQEGLYNELQKDKMAEAYSEIGMKGERRRGKGHDGLYQGLSTATKDTYDALHMQALPPR

SEQ ID NO: 10596 - protein, 842 aa, -Artificial-Sequence
MALPVTALLLPLALLLHAARPEFLVDMKVTQMPRYLIKRMGENVLLECGQDMSHETMYWYRQDPGLGLQLIYISYDVDSNSEGDIPKGYRVSRKKREHFSLILDSAKTNQTSVYFCASSSTNTEVFFGKGTRLTVLLEDLKNVFPPEVAVFEPSEAEISHTQKATLVCLATGFYPDHVELSWWVNGKEVHSGVSTDPQPLKEQPALNDSRYCLSSRLRVSATFWQNPRNHFRCQVQFYGLSENDEWTQDRAKPVTQIVSAEAWGRADCGSQAQSDCSCSTVSPGVLAGIVMGDLVLTVLIALAVYFLGRLVPRGRGAAEAATRKQRITETESPYQELQGQRSDVYSDLNTQRVKFSRSADAPAYQQGQNQLYNELNLGRREEYDVLDKRRGRDPEMGGKPQRRKNPQEGLYNELQKDKMAEAYSEIGMKGERRRGKGHDGLYQGLSTATKDTYDALHMQALPPRRAKRSGSGATNFSLLKQAGDVEENPGPTSMDWIWRILFLVGAATGAHSFEDGDSVTQTEGLVTLTEGLPVMLNCTYQTIYSNPFLFWYVQHLNESPRLLLKSFTDNKRTEHQGFHATLHKSSSSFHLQKSSAQLSDSALYYCAFDTNTYKVIFGKGTHLHVLPNTRIQNPDPAVYQLRDSKSSDKSVCLFTDFDSQTNVSQSKDSDVYITDKTVLDMRSMDFKSNSAVAWSNKSDFACANAFNNSIIPEDTFFPSPESSCGTTTPGERSSLPAFYPGTSGSCSGCGSLSLPLLAGLVAADAVASLLIVGAVFKRGRKKLLYIFKQPFMRPVQTTQEEDGCSCRFPEEEEGGCELLCARPRRSPAQEDGKVYINMPGRG

SEQ ID NO: 10597 - protein, 841 aa, -Artificial-Sequence
MALPVTALLLPLALLLHAARPEFLVDMKVTQMPRYLIKRMGENVLLECGQDMSHETMYWYRQDPGLGLQLIYISYDVDSNSEGDIPKGYRVSRKKREHFSLILDSAKTNQTSVYFCASSSTNTEVFFGKGTRLTVLLEDLKNVFPPEVAVFEPSEAEISHTQKATLVCLATGFYPDHVELSWWVNGKEVHSGVSTDPQPLKEQPALNDSRYCLSSRLRVSATFWQNPRNHFRCQVQFYGLSENDEWTQDRAKPVTQIVSAEAWGRADCGSQAQSDCSCSTVSPGVLAGIVMGDLVLTVLIALAVYFLGRLVPRGRGAAEAATRKQRITETESPYQELQGQRSDVYSDLNTQRVKFSRSADAPAYQQGQNQLYNELNLGRREEYDVLDKRRGRDPEMGGKPQRRKNPQEGLYNELQKDKMAEAYSEIGMKGERRRGKGHDGLYQGLSTATKDTYDALHMQALPPRRAKRSGSGATNFSLLKQAGDVEENPGPTSMDWIWRILFLVGAATGAHSFEDGDSVTQTEGLVTLTEGLPVMLNCTYQTIYSNPFLFWYVQHLNESPRLLLKSFTDNKRTEHQGFHATLHKSSSSFHLQKSSAQLSDSALYYCAFDTNTYKVIFGKGTHLHVLPNTRIQNPDPAVYQLRDSKSSDKSVCLFTDFDSQTNVSQSKDSDVYITDKTVLDMRSMDFKSNSAVAWSNKSDFACANAFNNSIIPEDTFFPSPESSCGTTTPGERSSLPAFYPGTSGSCSGCGSLSLPLLAGLVAADAVASLLIVGAVFRSKRSRLLHSDYMNMTPRRPGPTRKHYQPYAPPRDFAAYRSLCARPRRSPAQEDGKVYINMPGRG

SEQ ID NO: 10598 - protein, 1051 aa, -Artificial-Sequence
MALPVTALLLPLALLLHAARPEFLVDMKVTQMPRYLIKRMGENVLLECGQDMSHETMYWYRQDPGLGLQLIYISYDVDSNSEGDIPKGYRVSRKKREHFSLILDSAKTNQTSVYFCASSSTNTEVFFGKGTRLTVLLEDLKNVFPPEVAVFEPSEAEISHTQKATLVCLATGFYPDHVELSWWVNGKEVHSGVSTDPQPLKEQPALNDSRYCLSSRLRVSATFWQNPRNHFRCQVQFYGLSENDEWTQDRAKPVTQIVSAEAWGRADCGSQSFGLLDPKLCYLLDGILFIYGVILTALFLRVKFSRSADAPAYQQGQNQLYNELNLGRREEYDVLDKRRGRDPEMGGKPQRRKNPQEGLYNELQKDKMAEAYSEIGMKGERRRGKGHDGLYQGLSTATKDTYDALHMQALPPRRAKRSGSGATNFSLLKQAGDVEENPGPTSMDWIWRILFLVGAATGAHSFEDGDSVTQTEGLVTLTEGLPVMLNCTYQTIYSNPFLFWYVQHLNESPRLLLKSFTDNKRTEHQGFHATLHKSSSSFHLQKSSAQLSDSALYYCAFDTNTYKVIFGKGTHLHVLPNTRIQNPDPAVYQLRDSKSSDKSVCLFTDFDSQTNVSQSKDSDVYITDKTVLDMRSMDFKSNSAVAWSNKSDFACANAFNNSIIPEDTFFPSPESSCGTQSFGLLDPKLCYLLDGILFIYGVILTALFLRVKFSRSADAPAYQQGQNQLYNELNLGRREEYDVLDKRRGRDPEMGGKPQRRKNPQEGLYNELQKDKMAEAYSEIGMKGERRRGKGHDGLYQGLSTATKDTYDALHMQALPPRRAKRSGSGVKQTLNFDLLKLAGDVESNPGPSRGHMTEYKPTVRLATRDDVPRAVRTLAAAFADYPATRHTVDPDRHIERVTELQELFLTRVGLDIGKVWVADDGAAVAVWTTPESVEAGAVFAEIGPRMAELSGSRLAAQQQMEGLLAPHRPKEPAWFLATVGVSPDHQGKGLGSAVVLPGVEAAERAGVPAFLETSAPRNLPFYERLGFTVTADVEVPEGPRTWCMTRKPGA

SEQ ID NO: 10599 - protein, 827 aa, -Artificial-Sequence
MALPVTALLLPLALLLHAARPEFLVDMKVTQMPRYLIKRMGENVLLECGQDMSHETMYWYRQDPGLGLQLIYISYDVDSNSEGDIPKGYRVSRKKREHFSLILDSAKTNQTSVYFCASSSTNTEVFFGKGTRLTVLLEDLKNVFPPEVAVFEPSEAEISHTQKATLVCLATGFYPDHVELSWWVNGKEVHSGVSTDPQPLKEQPALNDSRYCLSSRLRVSATFWQNPRNHFRCQVQFYGLSENDEWTQDRAKPVTQIVSAEAWGRADCGSQSFGLLDPKLCYLLDGILFIYGVILTALFLRVKFSRSADAPAYQQGQNQLYNELNLGRREEYDVLDKRRGRDPEMGGKPQRRKNPQEGLYNELQKDKMAEAYSEIGMKGERRRGKGHDGLYQGLSTATKDTYDALHMQALPPRRAKRSGSGATNFSLLKQAGDVEENPGPTSMDWIWRILFLVGAATGAHSFEDGDSVTQTEGLVTLTEGLPVMLNCTYQTIYSNPFLFWYVQHLNESPRLLLKSFTDNKRTEHQGFHATLHKSSSSFHLQKSSAQLSDSALYYCAFDTNTYKVIFGKGTHLHVLPNTRASTKGPSVFPLAPSSKSTSGGTAALGCLVKDYFPEPVTVSWNSGALTSGVHTFPAVLQSSGLYSLSSVVTVPSSSLGTQTYICNVNHKPSNTKVDKRVEPKSCGTQSFGLLDPKLSYLLDGILFIYGVILTALFLRVKFSRSADAPAYQQGQNQLYNELNLGRREEYDVLDKRRGRDPEMGGKPQRRKNPQEGLYNELQKDKMAEAYSEIGMKGERRRGKGHDGLYQGLSTATKDTYDALHMQALPPR

SEQ ID NO: 10600 - protein, 827 aa, -Artificial-Sequence; identical to SEQ ID NO: 10599

SEQ ID NO: 10601 - protein, 827 aa, -Artificial-Sequence; identical to SEQ ID NO: 10599

SEQ ID NO: 10602 - protein, 818 aa, -Artificial-Sequence
MALPVTALLLPLALLLHAARPEFLVDMKVTQMPRYLIKRMGENVLLECGQDMSHETMYWYRQDPGLGLQLIYISYDVDSNSEGDIPKGYRVSRKKREHFSLILDSAKTNQTSVYFCASSSTNTEVFFGKGTRLTVLLEDLKNVFPPEVAVFEPSEAEISHTQKATLVCLATGFYPDHVELSWWVNGKEVHSGVSTDPQPLKEQPALNDSRYCLSSRLRVSATFWQNPRNHFRCQVQFYGLSENDEWTQDRAKPVTQIVSAEAWGRADCGSQSFGLLDPKLCYLLDGILFIYGVILTALFLRVKFSRSADAPAYQQGQNQLYNELNLGRREEYDVLDKRRGRDPEMGGKPQRRKNPQEGLYNELQKDKMAEAYSEIGMKGERRRGKGHDGLYQGLSTATKDTYDALHMQALPPRRAKRSGSGATNFSLLKQAGDVEENPGPTSMDWIWRILFLVGAATGAHSFEDGDSVTQTEGLVTLTEGLPVMLNCTYQTIYSNPFLFWYVQHLNESPRLLLKSFTDNKRTEHQGFHATLHKSSSSFHLQKSSAQLSDSALYYCAFDTNTYKVIFGKGTHLHVLPNTRIQNPDPAVYQLRDSKSSDKSVCLFTDFDSQTNVSQSKDSDVYITDKTVLDMRSMDFKSNSAVAWSNKSDFACANAFNNSIIPEDTFFPSPESSCGTQSFGLLDPKLSYLLDGILFIYGVILTALFLRVKFSRSADAPAYQQGQNQLYNELNLGRREEYDVLDKRRGRDPEMGGKPQRRKNPQEGLYNELQKDKMAEAYSEIGMKGERRRGKGHDGLYQGLSTATKDTYDALHMQALPPR

SEQ ID NO: 10603 - protein, 952 aa, -Artificial-Sequence
MALPVTALLLPLALLLHAARPEFLVDMKVTQMPRYLIKRMGENVLLECGQDMSHETMYWYRQDPGLGLQLIYISYDVDSNSEGDIPKGYRVSRKKREHFSLILDSAKTNQTSVYFCASSSTNTEVFFGKGTRLTVLLEGQPKANPTVTLFPPSSEELQANKATLVCLISDFYPGAVTVAWKADGSPVKAGVETTKPSKQSNNKYAASSYLSLTPEQWKSHRSYSCQVTHEGSTVEKTVAPTECSGSLGEPQLCYILDAILFLYGIVLTLLYCRLKIQVRKAAITSYEKSDGVYTGLSTRNQETYETLKHEKPPQRAKRSGSGATNFSLLKQAGDVEENPGPTSMDWIWRILFLVGAATGAHSFEDGDSVTQTEGLVTLTEGLPVMLNCTYQTIYSNPFLFWYVQHLNESPRLLLKSFTDNKRTEHQGFHATLHKSSSSFHLQKSSAQLSDSALYYCAFDTNTYKVIFGKGTHLHVLPNTRIQNPDPAVYQLRDSKSSDKSVCLFTDFDSQTNVSQSKDSDVYITDKTVLDMRSMDFKSNSAVAWSNKSDFACANAFNNSIIPEDTFFPSPESSCGTQSFGLLDPKLCYLLDGILFIYGVILTALFLRVKFSRSADAPAYQQGQNQLYNELNLGRREEYDVLDKRRGRDPEMGGKPQRRKNPQEGLYNELQKDKMAEAYSEIGMKGERRRGKGHDGLYQGLSTATKDTYDALHMQALPPRRAKRSGSGVKQTLNFDLLKLAGDVESNPGPSRGHMTEYKPTVRLATRDDVPRAVRTLAAAFADYPATRHTVDPDRHIERVTELQELFLTRVGLDIGKVWVADDGAAVAVWTTPESVEAGAVFAEIGPRMAELSGSRLAAQQQMEGLLAPHRPKEPAWFLATVGVSPDHQGKGLGSAVVLPGVEAAERAGVPAFLETSAPRNLPFYERLGFTVTADVEVPEGPRTWCMTRKPGA

SEQ ID NO: 10604 - protein, 752 aa, -Artificial-Sequence
MALPVTALLLPLALLLHAARPEFLVDMKVTQMPRYLIKRMGENVLLECGQDMSHETMYWYRQDPGLGLQLIYISYDVDSNSEGDIPKGYRVSRKKREHFSLILDSAKTNQTSVYFCASSSTNTEVFFGKGTRLTVLLEDLKNVFPPEVAVFEPSEAEISHTQKATLVCLATGFYPDHVELSWWVNGKEVHSGVSTDPQPLKEQPALNDSRYCLSSRLRVSATFWQNPRNHFRCQVQFYGLSENDEWTQDRAKPVTQIVSAEAWGRADCGSQSFGLLDPKLCYLLDGILFIYGVILTALFLRVKFSRSADAPAYQQGQNQLYNELNLGRREEYDVLDKRRGRDPEMGGKPQRRKNPQEGLYNELQKDKMAEAYSEIGMKGERRRGKGHDGLYQGLSTATKDTYDALHMQALPPRRAKRSGSGATNFSLLKQAGDVEENPGPTSMDWIWRILFLVGAATGAHSFEDGDSVTQTEGLVTLTEGLPVMLNCTYQTIYSNPFLFWYVQHLNESPRLLLKSFTDNKRTEHQGFHATLHKSSSSFHLQKSSAQLSDSALYYCAFDTNTYKVIFGKGTHLHVLPNTRASTKGPSVFPLAPSSKSTSGGTAALGCLVKDYFPEPVTVSWNSGALTSGVHTFPAVLQSSGLYSLSSVVTVPSSSLGTQTYICNVNHKPSNTKVDKRVEPKSCGTLGEPQLCYILDAILFLYGIVLTLLYCRLKIQVRKAAITSYEKSDGVYTGLSTRNQETYETLKHEKPPQ

SEQ ID NO: 10605 - protein, 752 aa, -Artificial-Sequence; identical to SEQ ID NO: 10604

SEQ ID NO: 10606 - protein, 743 aa, -Artificial-Sequence
MALPVTALLLPLALLLHAARPEFLVDMKVTQMPRYLIKRMGENVLLECGQDMSHETMYWYRQDPGLGLQLIYISYDVDSNSEGDIPKGYRVSRKKREHFSLILDSAKTNQTSVYFCASSSTNTEVFFGKGTRLTVLLEDLKNVFPPEVAVFEPSEAEISHTQKATLVCLATGFYPDHVELSWWVNGKEVHSGVSTDPQPLKEQPALNDSRYCLSSRLRVSATFWQNPRNHFRCQVQFYGLSENDEWTQDRAKPVTQIVSAEAWGRADCGSQSFGLLDPKLCYLLDGILFIYGVILTALFLRVKFSRSADAPAYQQGQNQLYNELNLGRREEYDVLDKRRGRDPEMGGKPQRRKNPQEGLYNELQKDKMAEAYSEIGMKGERRRGKGHDGLYQGLSTATKDTYDALHMQALPPRRAKRSGSGATNFSLLKQAGDVEENPGPTSMDWIWRILFLVGAATGAHSFEDGDSVTQTEGLVTLTEGLPVMLNCTYQTIYSNPFLFWYVQHLNESPRLLLKSFTDNKRTEHQGFHATLHKSSSSFHLQKSSAQLSDSALYYCAFDTNTYKVIFGKGTHLHVLPNTRIQNPDPAVYQLRDSKSSDKSVCLFTDFDSQTNVSQSKDSDVYITDKTVLDMRSMDFKSNSAVAWSNKSDFACANAFNNSIIPEDTFFPSPESSCGTLGEPQLCYILDAILFLYGIVLTLLYCRLKIQVRKAAITSYEKSDGVYTGLSTRNQETYETLKHEKPPQ

SEQ ID NO: 10607 - protein, 956 aa, -Artificial-Sequence
MALPVTALLLPLALLLHAARPEFLVDMKVTQMPRYLIKRMGENVLLECGQDMSHETMYWYRQDPGLGLQLIYISYDVDSNSEGDIPKGYRVSRKKREHFSLILDSAKTNQTSVYFCASSSTNTEVFFGKGTRLTVLLEGQPKANPTVTLFPPSSEELQANKATLVCLISDFYPGAVTVAWKADGSPVKAGVETTKPSKQSNNKYAASSYLSLTPEQWKSHRSYSCQVTHEGSTVEKTVAPTECSTTPGERSSLPAFYPGTSGSCSGCGSLSLPLLAGLVAADAVASLLIVGAVFLCARPRRSPAQEDGKVYINMPGRGRAKRSGSGATNFSLLKQAGDVEENPGPTSMDWIWRILFLVGAATGAHSFEDGDSVTQTEGLVTLTEGLPVMLNCTYQTIYSNPFLFWYVQHLNESPRLLLKSFTDNKRTEHQGFHATLHKSSSSFHLQKSSAQLSDSALYYCAFDTNTYKVIFGKGTHLHVLPNTRIQNPDPAVYQLRDSKSSDKSVCLFTDFDSQTNVSQSKDSDVYITDKTVLDMRSMDFKSNSAVAWSNKSDFACANAFNNSIIPEDTFFPSPESSCGTQSFGLLDPKLCYLLDGILFIYGVILTALFLRVKFSRSADAPAYQQGQNQLYNELNLGRREEYDVLDKRRGRDPEMGGKPQRRKNPQEGLYNELQKDKMAEAYSEIGMKGERRRGKGHDGLYQGLSTATKDTYDALHMQALPPRRAKRSGSGVKQTLNFDLLKLAGDVESNPGPSRGHMTEYKPTVRLATRDDVPRAVRTLAAAFADYPATRHTVDPDRHIERVTELQELFLTRVGLDIGKVWVADDGAAVAVWTTPESVEAGAVFAEIGPRMAELSGSRLAAQQQMEGLLAPHRPKEPAWFLATVGVSPDHQGKGLGSAVVLPGVEAAERAGVPAFLETSAPRNLPFYERLGFTVTADVEVPEGPRTWCMTRKPGA

SEQ ID NO: 10608 - protein, 989 aa, -Artificial-Sequence
MALPVTALLLPLALLLHAARPEFLVDMKVTQMPRYLIKRMGENVLLECGQDMSHETMYWYRQDPGLGLQLIYISYDVDSNSEGDIPKGYRVSRKKREHFSLILDSAKTNQTSVYFCASSSTNTEVFFGKGTRLTVLLEDLKNVFPPEVAVFEPSEAEISHTQKATLVCLATGFYPDHVELSWWVNGKEVHSGVSTDPQPLKEQPALNDSRYCLSSRLRVSATFWQNPRNHFRCQVQFYGLSENDEWTQDRAKPVTQIVSAEAWGRADCGSQSFGLLDPKLCYLLDGILFIYGVILTALFLRVKFSRSADAPAYQQGQNQLYNELNLGRREEYDVLDKRRGRDPEMGGKPQRRKNPQEGLYNELQKDKMAEAYSEIGMKGERRRGKGHDGLYQGLSTATKDTYDALHMQALPPRRAKRSGSGATNFSLLKQAGDVEENPGPTSMDWIWRILFLVGAATGAHSFEDGDSVTQTEGLVTLTEGLPVMLNCTYQTIYSNPFLFWYVQHLNESPRLLLKSFTDNKRTEHQGFHATLHKSSSSFHLQKSSAQLSDSALYYCAFDTNTYKVIFGKGTHLHVLPNTRASTKGPSVFPLAPSSKSTSGGTAALGCLVKDYFPEPVTVSWNSGALTSGVHTFPAVLQSSGLYSLSSVVTVPSSSLGTQTYICNVNHKPSNTKVDKRVEPKSCTTPGERSSLPAFYPGTSGSCSGCGSLSLPLLAGLVAADAVASLLIVGAVFLCARPRRSPAQEDGKVYINMPGRGRAKRSGSGVKQTLNFDLLKLAGDVESNPGPSRGHMTEYKPTVRLATRDDVPRAVRTLAAAFADYPATRHTVDPDRHIERVTELQELFLTRVGLDIGKVWVADDGAAVAVWTTPESVEAGAVFAEIGPRMAELSGSRLAAQQQMEGLLAPHRPKEPAWFLATVGVSPDHQGKGLGSAVVLPGVEAAERAGVPAFLETSAPRNLPFYERLGFTVTADVEVPEGPRTWCMTRKPGA

SEQ ID NO: 10609 - protein, 989 aa, -Artificial-Sequence; identical to SEQ ID NO: 10608

SEQ ID NO: 10610 - protein, 1096 aa, -Artificial-Sequence
MALPVTALLLPLALLLHAARPEFLVDMKVTQMPRYLIKRMGENVLLECGQDMSHETMYWYRQDPGLGLQLIYISYDVDSNSEGDIPKGYRVSRKKREHFSLILDSAKTNQTSVYFCASSSTNTEVFFGKGTRLTVLLEDLKNVFPPEVAVFEPSEAEISHTQKATLVCLATGFYPDHVELSWWVNGKEVHSGVSTDPQPLKEQPALNDSRYCLSSRLRVSATFWQNPRNHFRCQVQFYGLSENDEWTQDRAKPVTQIVSAEAWGRADCGSTTPGERSSLPAFYPGTSGSCSGCGSLSLPLLAGLVAADAVASLLIVGAVFLCARPRRSPAQEDGKVYINMPGRGSTSRVKFSRSADAPAYQQGQNQLYNELNLGRREEYDVLDKRRGRDPEMGGKPQRRKNPQEGLYNELQKDKMAEAYSEIGMKGERRRGKGHDGLYQGLSTATKDTYDALHMQALPPRRAKRSGSGATNFSLLKQAGDVEENPGPMDWIWRILFLVGAATGAHSFEDGDSVTQTEGLVTLTEGLPVMLNCTYQTIYSNPFLFWYVQHLNESPRLLLKSFTDNKRTEHQGFHATLHKSSSSFHLQKSSAQLSDSALYYCAFDTNTYKVIFGKGTHLHVLPNTRIQNPDPAVYQLRDSKSSDKSVCLFTDFDSQTNVSQSKDSDVYITDKTVLDMRSMDFKSNSAVAWSNKSDFACANAFNNSIIPEDTFFPSPESSCGTQSFGLLDPKLCYLLDGILFIYGVILTALFLRVKFSRSADAPAYQQGQNQLYNELNLGRREEYDVLDKRRGRDPEMGGKPQRRKNPQEGLYNELQKDKMAEAYSEIGMKGERRRGKGHDGLYQGLSTATKDTYDALHMQALPPRRAKRSGSGVKQTLNFDLLKLAGDVESNPGPSRGHMTEYKPTVRLATRDDVPRAVRTLAAAFADYPATRHTVDPDRHIERVTELQELFLTRVGLDIGKVWVADDGAAVAVWTTPESVEAGAVFAEIGPRMAELSGSRLAAQQQMEGLLAPHRPKEPAWFLATVGVSPDHQGKGLGSAVVLPGVEAAERAGVPAFLETSAPRNLPFYERLGFTVTADVEVPEGPRTWCMTRKPGA

SEQ ID NO: 10611 - protein, 989 aa, -Artificial-Sequence
MALPVTALLLPLALLLHAARPAIQTTDQGEVPNGYNVSRSTIEDFPPLTLESARPSHTSQYLCASSEARGLAEFTDTQYFGPGTRLTVLEGQPKANPTVTLFPPSSEELQANKATLVCLISDFYPGAVTVAWKADGSPVKAGVETTKPSKQSNNKYAASSYLSLTPEQWKSHRSYSCQVTHEGSTVEKTVAPTECSGSQSFGLLDPKLCYLLDGILFIYGVILTALFLRVKFSRSADAPAYQQGQNQLYNELNLGRREEYDVLDKRRGRDPEMGGKPQRRKNPQEGLYNELQKDKMAEAYSEIGMKGERRRGKGHDGLYQGLSTATKDTYDALHMQALPPRRAKRSGSGATNFSLLKQAGDVEENPGPTSMDWIWRILFLVGAATGAHSFEAQTVTQSQPEMSVQEAETVTLSCTYDTSESDYYLFWYKQPPSRQMILVIRQEAYKQQNATENRFSVNFQKAAKSFSLKISDSQLGDAAMYFCAYRSAVNARLMFGDGTQLVVKPNTRASTKGPSVFPLAPSSKSTSGGTAALGCLVKDYFPEPVTVSWNSGALTSGVHTFPAVLQSSGLYSLSSVVTVPSSSLGTQTYICNVNHKPSNTKVDKRVEPKSCGTQSFGLLDPKLCYLLDGILFIYGVILTALFLRVKFSRSADAPAYQQGQNQLYNELNLGRREEYDVLDKRRGRDPEMGGKPQRRKNPQEGLYNELQKDKMAEAYSEIGMKGERRRGKGHDGLYQGLSTATKDTYDALHMQALPPRRAKRSGSGVKQTLNFDLLKLAGDVESNPGPSRGHMTEYKPTVRLATRDDVPRAVRTLAAAFADYPATRHTVDPDRHIERVTELQELFLTRVGLDIGKVWVADDGAAVAVWTTPESVEAGAVFAEIGPRMAELSGSRLAAQQQMEGLLAPHRPKEPAWFLATVGVSPDHQGKGLGSAVVLPGVEAAERAGVPAFLETSAPRNLPFYERLGFTVTADVEVPEGPRTWCMTRKPGA

SEQ ID NO: 10612 - protein, 1007 aa, -Artificial-Sequence
MALPVTALLLPLALLLHAARPAIQTTDQGEVPNGYNVSRSTIEDFPPLTLESARPSHTSQYLCASSEARGLAEFTDTQYFGPGTRLTVLEGQPKANPTVTLFPPSSEELQANKATLVCLISDFYPGAVTVAWKADGSPVKAGVETTKPSKQSNNKYAASSYLSLTPEQWKSHRSYSCQVTHEGSTVEKTVAPTECSGSQSFGLLDPKLCYLLDGILFIYGVILTALFLRVKFSRSADAPAYQQGQNQLYNELNLGRREEYDVLDKRRGRDPEMGGKPQRRKNPQEGLYNELQKDKMAEAYSEIGMKGERRRGKGHDGLYQGLSTATKDTYDALHMQALPPRRAKRSGSGATNFSLLKQAGDVEENPGPTSMDWIWRILFLVGAATGAHSFEAQTVTQSQPEMSVQEAETVTLSCTYDTSESDYYLFWYKQPPSRQMILVIRQEAYKQQNATENRFSVNFQKAAKSFSLKISDSQLGDAAMYFCAYRSAVNARLMFGDGTQLVVKPNTRASPTSPKVFPLSLCSTQPDGNVVIACLVQGFFPQEPLSVTWSESGQGVTARNFPPSQDASGDLYTTSSQLTLPATQCLAGKSVTCHVKHYTNPSQDVTVPCPVPSTPPTPSPSTPPTPSPSGTQSFGLLDPKLCYLLDGILFIYGVILTALFLRVKFSRSADAPAYQQGQNQLYNELNLGRREEYDVLDKRRGRDPEMGGKPQRRKNPQEGLYNELQKDKMAEAYSEIGMKGERRRGKGHDGLYQGLSTATKDTYDALHMQALPPRRAKRSGSGVKQTLNFDLLKLAGDVESNPGPSRGHMTEYKPTVRLATRDDVPRAVRTLAAAFADYPATRHTVDPDRHIERVTELQELFLTRVGLDIGKVWVADDGAAVAVWTTPESVEAGAVFAEIGPRMAELSGSRLAAQQQMEGLLAPHRPKEPAWFLATVGVSPDHQGKGLGSAVVLPGVEAAERAGVPAFLETSAPRNLPFYERLGFTVTADVEVPEGPRTWCMTRKPGA

SEQ ID NO: 10613 - protein, 993 aa, -Artificial-Sequence
ASTMALPVTALLLPLALLLHAARPAIQTTDQGEVPNGYNVSRSTIEDFPPLTLESARPSHTSQYLCASSEARGLAEFTDTQYFGPGTRLTVLEGQPKANPTVTLFPPSSEELQANKATLVCLISDFYPGAVTVAWKADGSPVKAGVETTKPSKQSNNKYAASSYLSLTPEQWKSHRSYSCQVTHEGSTVEKTVAPTECSGSQSFGLLDPKLCYLLDGILFIYGVILTALFLRVKFSRSADAPAYQQGQNQLYNELNLGRREEYDVLDKRRGRDPEMGGKPQRRKNPQEGLYNELQKDKMAEAYSEIGMKGERRRGKGHDGLYQGLSTATKDTYDALHMQALPPRRAKRSGSGATNFSLLKQAGDVEENPGPTSMDWIWRILFLVGAATGAHSFEAQTVTQSQPEMSVQEAETVTLSCTYDTSESDYYLFWYKQPPSRQMILVIRQEAYKQQNATENRFSVNFQKAAKSFSLKISDSQLGDAAMYFCAYRSAVNARLMFGDGTQLVVKPNTRASTKGPSVFPLAPCSRSTSESTAALGCLVKDYFPEPVTVSWNSGALTSGVHTFPAVLQSSGLYSLSSVVTVPSSNFGTQTYTCNVDHKPSNTKVDKTVERKCGTQSFGLLDPKLCYLLDGILFIYGVILTALFLRVKFSRSADAPAYQQGQNQLYNELNLGRREEYDVLDKRRGRDPEMGGKPQRRKNPQEGLYNELQKDKMAEAYSEIGMKGERRRGKGHDGLYQGLSTATKDTYDALHMQALPPRRAKRSGSGVKQTLNFDLLKLAGDVESNPGPSRGHMTEYKPTVRLATRDDVPRAVRTLAAAFADYPATRHTVDPDRHIERVTELQELFLTRVGLDIGKVWVADDGAAVAVWTTPESVEAGAVFAEIGPRMAELSGSRLAAQQQMEGLLAPHRPKEPAWFLATVGVSPDHQGKGLGSAVVLPGVEAAERAGVPAFLETSAPRNLPFYERLGFTVTADVEVPEGPRTWCMTRKPGAVD

SEQ ID NO: 10614 - protein, 1094 aa, -Artificial-Sequence
MALPVTALLLPLALLLHAARPEADIYQTPRYLVIGTGKKITLECSQTMGHDKMYWYQQDPGMELHLIHYSYGVNSTEKGDLSSESTVSRIRTEHFPLTLESARPSHTSQYLCASSEARGLAEFTDTQYFGPGTRLTVLEGQPKANPTVTLFPPSSEELQANKATLVCLISDFYPGAVTVAWKADGSPVKAGVETTKPSKQSNNKYAASSYLSLTPEQWKSHRSYSCQVTHEGSTVEKTVAPTECSGSQSFGLLDPKLCYLLDGILFIYGVILTALFLRVKFSRSADAPAYQQGQNQLYNELNLGRREEYDVLDKRRGRDPEMGGKPQRRKNPQEGLYNELQKDKMAEAYSEIGMKGERRRGKGHDGLYQGLSTATKDTYDALHMQALPPRRAKRSGSGATNFSLLKQAGDVEENPGPTSMDWIWRILFLVGAATGAHSFEAQTVTQSQPEMSVQEAETVTLSCTYDTSESDYYLFWYKQPPSRQMILVIRQEAYKQQNATENRFSVNFQKAAKSFSLKISDSQLGDAAMYFCAYRSAVNARLMFGDGTQLVVKPNTRAPTKAPDVFPIISGCRHPKDNSPVVLACLITGYHPTSVTVTWYMGTQSQPQRTFPEIQRRDSYYMTSSQLSTPLQQWRQGEYKCVVQHTASKSKKEIFRWPESPKAQASSVPTAQPQAEGSLAKATTAPATTRNTGRGGEEKKKEKEKEEQEERETKTPGTQSFGLLDPKLCYLLDGILFIYGVILTALFLRVKFSRSADAPAYQQGQNQLYNELNLGRREEYDVLDKRRGRDPEMGGKPQRRKNPQEGLYNELQKDKMAEAYSEIGMKGERRRGKGHDGLYQGLSTATKDTYDALHMQALPPRRAKRSGSGVKQTLNFDLLKLAGDVESNPGPSRGHMTEYKPTVRLATRDDVPRAVRTLAAAFADYPATRHTVDPDRHIERVTELQELFLTRVGLDIGKVWVADDGAAVAVWTTPESVEAGAVFAEIGPRMAELSGSRLAAQQQMEGLLAPHRPKEPAWFLATVGVSPDHQGKGLGSAVVLPGVEAAERAGVPAFLETSAPRNLPFYERLGFTVTADVEVPEGPRTWCMTRKPGA

SEQ ID NO: 10615 - protein, 1036 aa, -Artificial-Sequence
MALPVTALLLPLALLLHAARPEADIYQTPRYLVIGTGKKITLECSQTMGHDKMYWYQQDPGMELHLIHYSYGVNSTEKGDLSSESTVSRIRTEHFPLTLESARPSHTSQYLCASSEARGLAEFTDTQYFGPGTRLTVLEGQPKANPTVTLFPPSSEELQANKATLVCLISDFYPGAVTVAWKADGSPVKAGVETTKPSKQSNNKYAASSYLSLTPEQWKSHRSYSCQVTHEGSTVEKTVAPTECSGSQSFGLLDPKLCYLLDGILFIYGVILTALFLRVKFSRSADAPAYQQGQNQLYNELNLGRREEYDVLDKRRGRDPEMGGKPQRRKNPQEGLYNELQKDKMAEAYSEIGMKGERRRGKGHDGLYQGLSTATKDTYDALHMQALPPRRAKRSGSGATNFSLLKQAGDVEENPGPTSMDWIWRILFLVGAATGAHSFEAQTVTQSQPEMSVQEAETVTLSCTYDTSESDYYLFWYKQPPSRQMILVIRQEAYKQQNATENRFSVNFQKAAKSFSLKISDSQLGDAAMYFCAYRSAVNARLMFGDGTQLVVKPNTRASTKGPSVFPLAPCSRSTSESTAALGCLVKDYFPEPVTVSWNSGALTSGVHTFPAVLQSSGLYSLSSVVTVPSSNFGTQTYTCNVDHKPSNTKVDKTVERKGTQSFGLLDPKLCYLLDGILFIYGVILTALFLRVKFSRSADAPAYQQGQNQLYNELNLGRREEYDVLDKRRGRDPEMGGKPQRRKNPQEGLYNELQKDKMAEAYSEIGMKGERRRGKGHDGLYQGLSTATKDTYDALHMQALPPRRAKRSGSGVKQTLNFDLLKLAGDVESNPGPSRGHMTEYKPTVRLATRDDVPRAVRTLAAAFADYPATRHTVDPDRHIERVTELQELFLTRVGLDIGKVWVADDGAAVAVWTTPESVEAGAVFAEIGPRMAELSGSRLAAQQQMEGLLAPHRPKEPAWFLATVGVSPDHQGKGLGSAVVLPGVEAAERAGVPAFLETSAPRNLPFYERLGFTVTADVEVPEGPRTWCMTRKPGA

SEQ ID NO: 10616 - protein, 1045 aa, -Artificial-Sequence
MALPVTALLLPLALLLHAARPEADIYQTPRYLVIGTGKKITLECSQTMGHDKMYWYQQDPGMELHLIHYSYGVNSTEKGDLSSESTVSRIRTEHFPLTLESARPSHTSQYLCASSEARGLAEFTDTQYFGPGTRLTVLEGQPKANPTVTLFPPSSEELQANKATLVCLISDFYPGAVTVAWKADGSPVKAGVETTKPSKQSNNKYAASSYLSLTPEQWKSHRSYSCQVTHEGSTVEKTVAPTECSGSQSFGLLDPKLCYLLDGILFIYGVILTALFLRVKFSRSADAPAYQQGQNQLYNELNLGRREEYDVLDKRRGRDPEMGGKPQRRKNPQEGLYNELQKDKMAEAYSEIGMKGERRRGKGHDGLYQGLSTATKDTYDALHMQALPPRRAKRSGSGATNFSLLKQAGDVEENPGPTSMDWIWRILFLVGAATGAHSFEAQTVTQSQPEMSVQEAETVTLSCTYDTSESDYYLFWYKQPPSRQMILVIRQEAYKQQNATENRFSVNFQKAAKSFSLKISDSQLGDAAMYFCAYRSAVNARLMFGDGTQLVVKPNTRASPTSPKVFPLSLDSTPQDGNVVVACLVQGFFPQEPLSVTWSESGQNVTARNFPPSQDASGDLYTTSSQLTLPATQCPDGKSVTCHVKHYTNPSQDVTVPCPVPPPPPGTQSFGLLDPKLCYLLDGILFIYGVILTALFLRVKFSRSADAPAYQQGQNQLYNELNLGRREEYDVLDKRRGRDPEMGGKPQRRKNPQEGLYNELQKDKMAEAYSEIGMKGERRRGKGHDGLYQGLSTATKDTYDALHMQALPPRRAKRSGSGVKQTLNFDLLKLAGDVESNPGPSRGHMTEYKPTVRLATRDDVPRAVRTLAAAFADYPATRHTVDPDRHIERVTELQELFLTRVGLDIGKVWVADDGAAVAVWTTPESVEAGAVFAEIGPRMAELSGSRLAAQQQMEGLLAPHRPKEPAWFLATVGVSPDHQGKGLGSAVVLPGVEAAERAGVPAFLETSAPRNLPFYERLGFTVTADVEVPEGPRTWCMTRKPGAVD

SEQ ID NO: 10617 - protein, 1038 aa, -Artificial-Sequence
MALPVTALLLPLALLLHAARPEADIYQTPRYLVIGTGKKITLECSQTMGHDKMYWYQQDPGMELHLIHYSYGVNSTEKGDLSSESTVSRIRTEHFPLTLESARPSHTSQYLCASSEARGLAEFTDTQYFGPGTRLTVLEGQPKANPTVTLFPPSSEELQANKATLVCLISDFYPGAVTVAWKADGSPVKAGVETTKPSKQSNNKYAASSYLSLTPEQWKSHRSYSCQVTHEGSTVEKTVAPTECSGSQSFGLLDPKLCYLLDGILFIYGVILTALFLRVKFSRSADAPAYQQGQNQLYNELNLGRREEYDVLDKRRGRDPEMGGKPQRRKNPQEGLYNELQKDKMAEAYSEIGMKGERRRGKGHDGLYQGLSTATKDTYDALHMQALPPRRAKRSGSGATNFSLLKQAGDVEENPGPTSMDWIWRILFLVGAATGAHSFEAQTVTQSQPEMSVQEAETVTLSCTYDTSESDYYLFWYKQPPSRQMILVIRQEAYKQQNATENRFSVNFQKAAKSFSLKISDSQLGDAAMYFCAYRSAVNARLMFGDGTQLVVKPNTRASTQSPSVFPLTRCCKNIPSNATSVTLGCLATGYFPEPVMVTWDTGSLNGTTMTLPATTLTLSGHYATISLLTVSGAWAKQMFTCRVAHTPSSTDWVDNKTFSGTQSFGLLDPKLCYLLDGILFIYGVILTALFLRVKFSRSADAPAYQQGQNQLYNELNLGRREEYDVLDKRRGRDPEMGGKPQRRKNPQEGLYNELQKDKMAEAYSEIGMKGERRRGKGHDGLYQGLSTATKDTYDALHMQALPPRRAKRSGSGVKQTLNFDLLKLAGDVESNPGPSRGHMTEYKPTVRLATRDDVPRAVRTLAAAFADYPATRHTVDPDRHIERVTELQELFLTRVGLDIGKVWVADDGAAVAVWTTPESVEAGAVFAEIGPRMAELSGSRLAAQQQMEGLLAPHRPKEPAWFLATVGVSPDHQGKGLGSAVVLPGVEAAERAGVPAFLETSAPRNLPFYERLGFTVTADVEVPEGPRTWCMTRKPGA

SEQ ID NO: 10618 - protein, 1038 aa, -Artificial-Sequence
MALPVTALLLPLALLLHAARPEADIYQTPRYLVIGTGKKITLECSQTMGHDKMYWYQQDPGMELHLIHYSYGVNSTEKGDLSSESTVSRIRTEHFPLTLESARPSHTSQYLCASSEARGLAEFTDTQYFGPGTRLTVLEGQPKANPTVTLFPPSSEELQANKATLVCLISDFYPGAVTVAWKADGSPVKAGVETTKPSKQSNNKYAASSYLSLTPEQWKSHRSYSCQVTHEGSTVEKTVAPTECSGSQSFGLLDPKLCYLLDGILFIYGVILTALFLRVKFSRSADAPAYQQGQNQLYNELNLGRREEYDVLDKRRGRDPEMGGKPQRRKNPQEGLYNELQKDKMAEAYSEIGMKGERRRGKGHDGLYQGLSTATKDTYDALHMQALPPRRAKRSGSGATNFSLLKQAGDVEENPGPTSMDWIWRILFLVGAATGAHSFEAQTVTQSQPEMSVQEAETVTLSCTYDTSESDYYLFWYKQPPSRQMILVIRQEAYKQQNATENRFSVNFQKAAKSFSLKISDSQLGDAAMYFCAYRSAVNARLMFGDGTQLVVKPNTRASTKGPSVFPLAPCSRSTSESTAALGCLVKDYFPEPVTVSWNSGALTSGVHTFPAVLQSSGLYSLSSVVTVPSSSLGTKTYTCNVDHKPSNTKVDKRVESKYGGTQSFGLLDPKLCYLLDGILFIYGVILTALFLRVKFSRSADAPAYQQGQNQLYNELNLGRREEYDVLDKRRGRDPEMGGKPQRRKNPQEGLYNELQKDKMAEAYSEIGMKGERRRGKGHDGLYQGLSTATKDTYDALHMQALPPRRAKRSGSGVKQTLNFDLLKLAGDVESNPGPSRGHMTEYKPTVRLATRDDVPRAVRTLAAAFADYPATRHTVDPDRHIERVTELQELFLTRVGLDIGKVWVADDGAAVAVWTTPESVEAGAVFAEIGPRMAELSGSRLAAQQQMEGLLAPHRPKEPAWFLATVGVSPDHQGKGLGSAVVLPGVEAAERAGVPAFLETSAPRNLPFYERLGFTVTADVEVPEGPRTWCMTRKPGA

SEQ ID NO: 10619 - protein, 1038 aa, -Artificial-Sequence
MALPVTALLLPLALLLHAARPEADIYQTPRYLVIGTGKKITLECSQTMGHDKMYWYQQDPGMELHLIHYSYGVNSTEKGDLSSESTVSRIRTEHFPLTLESARPSHTSQYLCASSEARGLAEFTDTQYFGPGTRLTVLEGQPKANPTVTLFPPSSEELQANKATLVCLISDFYPGAVTVAWKADGSPVKAGVETTKPSKQSNNKYAASSYLSLTPEQWKSHRSYSCQVTHEGSTVEKTVAPTECSGSQSFGLLDPKLCYLLDGILFIYGVILTALFLRVKFSRSADAPAYQQGQNQLYNELNLGRREEYDVLDKRRGRDPEMGGKPQRRKNPQEGLYNELQKDKMAEAYSEIGMKGERRRGKGHDGLYQGLSTATKDTYDALHMQALPPRRAKRSGSGATNFSLLKQAGDVEENPGPTSMDWIWRILFLVGAATGAHSFEAQTVTQSQPEMSVQEAETVTLSCTYDTSESDYYLFWYKQPPSRQMILVIRQEAYKQQNATENRFSVNFQKAAKSFSLKISDSQLGDAAMYFCAYRSAVNARLMFGDGTQLVVKPNTRASTKGPSVFPLAPCSRSTSESTAALGCLVKDYFPEPVTVSWNSGALTSGVHTFPAVLQSSGLYSLSSVVTVPSSNFGTQTYTCNVDHKPSNTKVDKTVERKCCGTQSFGLLDPKLCYLLDGILFIYGVILTALFLRVKFSRSADAPAYQQGQNQLYNELNLGRREEYDVLDKRRGRDPEMGGKPQRRKNPQEGLYNELQKDKMAEAYSEIGMKGERRRGKGHDGLYQGLSTATKDTYDALHMQALPPRRAKRSGSGVKQTLNFDLLKLAGDVESNPGPSRGHMTEYKPTVRLATRDDVPRAVRTLAAAFADYPATRHTVDPDRHIERVTELQELFLTRVGLDIGKVWVADDGAAVAVWTTPESVEAGAVFAEIGPRMAELSGSRLAAQQQMEGLLAPHRPKEPAWFLATVGVSPDHQGKGLGSAVVLPGVEAAERAGVPAFLETSAPRNLPFYERLGFTVTADVEVPEGPRTWCMTRKPGA

SEQ ID NO: 10620 - protein, 1053 aa, -Artificial-Sequence
MALPVTALLLPLALLLHAARPEADIYQTPRYLVIGTGKKITLECSQTMGHDKMYWYQQDPGMELHLIHYSYGVNSTEKGDLSSESTVSRIRTEHFPLTLESARPSHTSQYLCASSEARGLAEFTDTQYFGPGTRLTVLEDLKNVFPPEVAVFEPSEAEISHTQKATLVCLATGFYPDHVELSWWVNGKEVHSGVSTDPQPLKEQPALNDSRYCLSSRLRVSATFWQNPRNHFRCQVQFYGLSENDEWTQDRAKPVTQIVSAEAWGRADCGSQSFGLLDPKLCYLLDGILFIYGVILTALFLRVKFSRSADAPAYQQGQNQLYNELNLGRREEYDVLDKRRGRDPEMGGKPQRRKNPQEGLYNELQKDKMAEAYSEIGMKGERRRGKGHDGLYQGLSTATKDTYDALHMQALPPRRAKRSGSGATNFSLLKQAGDVEENPGPTSMDWIWRILFLVGAATGAHSFEAQTVTQSQPEMSVQEAETVTLSCTYDTSESDYYLFWYKQPPSRQMILVIRQEAYKQQNATENRFSVNFQKAAKSFSLKISDSQLGDAAMYFCAYRSAVNARLMFGDGTQLVVKPNTRIQNPDPAVYQLRDSKSSDKSVCLFTDFDSQTNVSQSKDSDVYITDKTVLDMRSMDFKSNSAVAWSNKSDFACANAFNNSIIPEDTFFPSPESSCGTQSFGLLDPKLCYLLDGILFIYGVILTALFLRVKFSRSADAPAYQQGQNQLYNELNLGRREEYDVLDKRRGRDPEMGGKPQRRKNPQEGLYNELQKDKMAEAYSEIGMKGERRRGKGHDGLYQGLSTATKDTYDALHMQALPPRRAKRSGSGVKQTLNFDLLKLAGDVESNPGPSRGHMTEYKPTVRLATRDDVPRAVRTLAAAFADYPATRHTVDPDRHIERVTELQELFLTRVGLDIGKVWVADDGAAVAVWTTPESVEAGAVFAEIGPRMAELSGSRLAAQQQMEGLLAPHRPKEPAWFLATVGVSPDHQGKGLGSAVVLPGVEAAERAGVPAFLETSAPRNLPFYERLGFTVTADVEVPEGPRTWCMTRKPGA

SEQ ID NO: 10621 - protein, 1053 aa, -Artificial-Sequence
MALPVTALLLPLALLLHAARPEADIYQTPRYLVIGTGKKITLECSQTMGHDKMYWYQQDPGMELHLIHYSYGVNSTEKGDLSSESTVSRIRTEHFPLTLESARPSHTSQYLCASSEARGLAEFTDTQYFGPGTRLTVLEDLKNVFPPEVAVFEPSKAEIAHTQKATLVCLATGFYPDHVELSWWVNGKEVHSGVCTDPQPLKEQPALNDSRYCLSSRLRVSATFWQNPRNHFRCQVQFYGLSENDEWTQDRAKPVTQIVSAEAWGRADCGSQSFGLLDPKLCYLLDGILFIYGVILTALFLRVKFSRSADAPAYQQGQNQLYNELNLGRREEYDVLDKRRGRDPEMGGKPQRRKNPQEGLYNELQKDKMAEAYSEIGMKGERRRGKGHDGLYQGLSTATKDTYDALHMQALPPRRAKRSGSGATNFSLLKQAGDVEENPGPTSMDWIWRILFLVGAATGAHSFEAQTVTQSQPEMSVQEAETVTLSCTYDTSESDYYLFWYKQPPSRQMILVIRQEAYKQQNATENRFSVNFQKAAKSFSLKISDSQLGDAAMYFCAYRSAVNARLMFGDGTQLVVKPNTRIQNPDPAVYQLRDSKSSDKSVCLFTDFDSQTNVSQSKDSDVYITDKCVLDMRSMDFKSNSAVAWSNKSDFACANAFNNSIIPEDTFFPSSDVPCGTQSFGLLDPKLCYLLDGILFIYGVILTALFLRVKFSRSADAPAYQQGQNQLYNELNLGRREEYDVLDKRRGRDPEMGGKPQRRKNPQEGLYNELQKDKMAEAYSEIGMKGERRRGKGHDGLYQGLSTATKDTYDALHMQALPPRRAKRSGSGVKQTLNFDLLKLAGDVESNPGPSRGHMTEYKPTVRLATRDDVPRAVRTLAAAFADYPATRHTVDPDRHIERVTELQELFLTRVGLDIGKVWVADDGAAVAVWTTPESVEAGAVFAEIGPRMAELSGSRLAAQQQMEGLLAPHRPKEPAWFLATVGVSPDHQGKGLGSAVVLPGVEAAERAGVPAFLETSAPRNLPFYERLGFTVTADVEVPEGPRTWCMTRKPGA

SEQ ID NO: 10622 - protein, 820 aa, -Artificial-Sequence
MALPVTALLLPLALLLHAARPEADIYQTPRYLVIGTGKKITLECSQTMGHDKMYWYQQDPGMELHLIHYSYGVNSTEKGDLSSESTVSRIRTEHFPLTLESARPSHTSQYLCASSEARGLAEFTDTQYFGPGTRLTVLEDLKNVFPPEVAVFEPSEAEISHTQKATLVCLATGFYPDHVELSWWVNGKEVHSGVCTDPQPLKEQPALNDSRYCLSSRLRVSATFWQNPRNHFRCQVQFYGLSENDEWTQDRAKPVTQIVSAEAWGRADCGSQSFGLLDPKLCYLLDGILFIYGVILTALFLRVKFSRSADAPAYQQGQNQLYNELNLGRREEYDVLDKRRGRDPEMGGKPQRRKNPQEGLYNELQKDKMAEAYSEIGMKGERRRGKGHDGLYQGLSTATKDTYDALHMQALPPRRAKRSGSGATNFSLLKQAGDVEENPGPTSMDWIWRILFLVGAATGAHSFEAQTVTQSQPEMSVQEAETVTLSCTYDTSESDYYLFWYKQPPSRQMILVIRQEAYKQQNATENRFSVNFQKAAKSFSLKISDSQLGDAAMYFCAYRSAVNARLMFGDGTQLVVKPNTRIQNPDPAVYQLRDSKSSDKSVCLFTDFDSQTNVSQSKDSDVYITDKCVLDMRSMDFKSNSAVAWSNKSDFACANAFNNSIIPEDTFFPSPESSCGTQSFGLLDPKLCYLLDGILFIYGVILTALFLRVKFSRSADAPAYQQGQNQLYNELNLGRREEYDVLDKRRGRDPEMGGKPQRRKNPQEGLYNELQKDKMAEAYSEIGMKGERRRGKGHDGLYQGLSTATKDTYDALHMQALPPR

SEQ ID NO: 10623 - protein, 825 aa, -Artificial-Sequence
MALPVTALLLPLALLLHAARPEADIYQTPRYLVIGTGKKITLECSQTMGHDKMYWYQQDPGMELHLIHYSYGVNSTEKGDLSSESTVSRIRTEHFPLTLESARPSHTSQYLCASSEARGLAEFTDTQYFGPGTRLTVLEQSFGLLDPKLCYLLDGILFIYGVILTALFLRVKFSRSADAPAYQQGQNQLYNELNLGRREEYDVLDKRRGRDPEMGGKPQRRKNPQEGLYNELQKDKMAEAYSEIGMKGERRRGKGHDGLYQGLSTATKDTYDALHMQALPPRRAKRSGSGATNFSLLKQAGDVEENPGPTSMDWIWRILFLVGAATGAHSFEAQTVTQSQPEMSVQEAETVTLSCTYDTSESDYYLFWYKQPPSRQMILVIRQEAYKQQNATENRFSVNFQKAAKSFSLKISDSQLGDAAMYFCAYRSAVNARLMFGDGTQLVVKPNTRQSFGLLDPKLCYLLDGILFIYGVILTALFLRVKFSRSADAPAYQQGQNQLYNELNLGRREEYDVLDKRRGRDPEMGGKPQRRKNPQEGLYNELQKDKMAEAYSEIGMKGERRRGKGHDGLYQGLSTATKDTYDALHMQALPPRRAKRSGSGVKQTLNFDLLKLAGDVESNPGPSRGHMTEYKPTVRLATRDDVPRAVRTLAAAFADYPATRHTVDPDRHIERVTELQELFLTRVGLDIGKVWVADDGAAVAVWTTPESVEAGAVFAEIGPRMAELSGSRLAAQQQMEGLLAPHRPKEPAWFLATVGVSPDHQGKGLGSAVVLPGVEAAERAGVPAFLETSAPRNLPFYERLGFTVTADVEVPEGPRTWCMTRKPGA

SEQ ID NO: 10624 - protein, 861 aa, -Artificial-Sequence
MALPVTALLLPLALLLHAARPEADIYQTPRYLVIGTGKKITLECSQTMGHDKMYWYQQDPGMELHLIHYSYGVNSTEKGDLSSESTVSRIRTEHFPLTLESARPSHTSQYLCASSEARGLAEFTDTQYFGPGTRLTVLEDLKNVFPPEVAVFEPSEAEISHTQKATLVCLATGFYPDHVELSWWVNGKEVHSGVCTDPQPLKEQPALNDSRYCLSSRLRVSATFWQNPRNHFRCQVQFYGLSENDEWTQDRAKPVTQIVSAEAWGRADCGSQSFGLLDPKLCYLLDGILFIYGVILTALFLRSKRSRLLHSDYMNMTPRRPGPTRKHYQPYAPPRDFAAYRSRVKFSRSADAPAYQQGQNQLYNELNLGRREEYDVLDKRRGRDPEMGGKPQRRKNPQEGLYNELQKDKMAEAYSEIGMKGERRRGKGHDGLYQGLSTATKDTYDALHMQALPPRRAKRSGSGATNFSLLKQAGDVEENPGPTSMDWIWRILFLVGAATGAHSFEAQTVTQSQPEMSVQEAETVTLSCTYDTSESDYYLFWYKQPPSRQMILVIRQEAYKQQNATENRFSVNFQKAAKSFSLKISDSQLGDAAMYFCAYRSAVNARLMFGDGTQLVVKPNTRIQNPDPAVYQLRDSKSSDKSVCLFTDFDSQTNVSQSKDSDVYITDKCVLDMRSMDFKSNSAVAWSNKSDFACANAFNNSIIPEDTFFPSPESSCGTQSFGLLDPKLCYLLDGILFIYGVILTALFLRVKFSRSADAPAYQQGQNQLYNELNLGRREEYDVLDKRRGRDPEMGGKPQRRKNPQEGLYNELQKDKMAEAYSEIGMKGERRRGKGHDGLYQGLSTATKDTYDALHMQALPPR

SEQ ID NO: 10625 - protein, 902 aa, -Artificial-Sequence
MALPVTALLLPLALLLHAARPEADIYQTPRYLVIGTGKKITLECSQTMGHDKMYWYQQDPGMELHLIHYSYGVNSTEKGDLSSESTVSRIRTEHFPLTLESARPSHTSQYLCASSEARGLAEFTDTQYFGPGTRLTVLEDLKNVFPPEVAVFEPSEAEISHTQKATLVCLATGFYPDHVELSWWVNGKEVHSGVCTDPQPLKEQPALNDSRYCLSSRLRVSATFWQNPRNHFRCQVQFYGLSENDEWTQDRAKPVTQIVSAEAWGRADCGSQSFGLLDPKLCYLLDGILFIYGVILTALFLRSKRSRLLHSDYMNMTPRRPGPTRKHYQPYAPPRDFAAYRSRVKFSRSADAPAYQQGQNQLYNELNLGRREEYDVLDKRRGRDPEMGGKPQRRKNPQEGLYNELQKDKMAEAYSEIGMKGERRRGKGHDGLYQGLSTATKDTYDALHMQALPPRRAKRSGSGATNFSLLKQAGDVEENPGPTSMDWIWRILFLVGAATGAHSFEAQTVTQSQPEMSVQEAETVTLSCTYDTSESDYYLFWYKQPPSRQMILVIRQEAYKQQNATENRFSVNFQKAAKSFSLKISDSQLGDAAMYFCAYRSAVNARLMFGDGTQLVVKPNTRIQNPDPAVYQLRDSKSSDKSVCLFTDFDSQTNVSQSKDSDVYITDKCVLDMRSMDFKSNSAVAWSNKSDFACANAFNNSIIPEDTFFPSPESSCGTQSFGLLDPKLCYLLDGILFIYGVILTALFLRSKRSRLLHSDYMNMTPRRPGPTRKHYQPYAPPRDFAAYRSRVKFSRSADAPAYQQGQNQLYNELNLGRREEYDVLDKRRGRDPEMGGKPQRRKNPQEGLYNELQKDKMAEAYSEIGMKGERRRGKGHDGLYQGLSTATKDTYDALHMQALPPR

SEQ ID NO: 10626 - protein, 820 aa, -Artificial-Sequence
MALPVTALLLPLALLLHAARPEADIYQTPRYLVIGTGKKITLECSQTMGHDKMYWYQQDPGMELHLIHYSYGVNSTEKGDLSSESTVSRIRTEHFPLTLESARPSHTSQYLCASSEARGLAEFTDTQYFGPGTRLTVLEDLKNVFPPEVAVFEPSEAEISHTQKATLVCLATGFYPDHVELSWWVNGKEVHSGVSTDPQPLKEQPALNDSRYCLSSRLRVSATFWQNPRNHFRCQVQFYGLSENDEWTQDRAKPVTQIVSAEAWGRADCGSQSFGLLDPKLCYLLDGILFIYGVILTALFLRVKFSRSADAPAYQQGQNQLYNELNLGRREEYDVLDKRRGRDPEMGGKPQRRKNPQEGLYNELQKDKMAEAYSEIGMKGERRRGKGHDGLYQGLSTATKDTYDALHMQALPPRRAKRSGSGATNFSLLKQAGDVEENPGPTSMDWIWRILFLVGAATGAHSFEAQTVTQSQPEMSVQEAETVTLSCTYDTSESDYYLFWYKQPPSRQMILVIRQEAYKQQNATENRFSVNFQKAAKSFSLKISDSQLGDAAMYFCAYRSAVNARLMFGDGTQLVVKPNTRIQNPDPAVYQLRDSKSSDKSVCLFTDFDSQTNVSQSKDSDVYITDKTVLDMRSMDFKSNSAVAWSNKSDFACANAFNNSIIPEDTFFPSPESSCGTQSFGLLDPKLCYLLDGILFIYGVILTALFLRVKFSRSADAPAYQQGQNQLYNELNLGRREEYDVLDKRRGRDPEMGGKPQRRKNPQEGLYNELQKDKMAEAYSEIGMKGERRRGKGHDGLYQGLSTATKDTYDALHMQALPPR

SEQ ID NO: 10627 - protein, 1028 aa, -Artificial-Sequence
MALPVTALLLPLALLLHAARPEADIYQTPRYLVIGTGKKITLECSQTMGHDKMYWYQQDPGMELHLIHYSYGVNSTEKGDLSSESTVSRIRTEHFPLTLESARPSHTSQYLCASSEARGLAEFTDTQYFGPGTRLTVLEDKQLDADVSPKPTIFLPSIAETKLQKAGTYLCLLEKFFPDVIKIHWQEKKSNTILGSQEGNTMKTNDTYMKFSWLTVPEKSLDKEHRCIVRHENNKNGVDQEIIFPPIKTDVITGSQSFGLLDPKLCYLLDGILFIYGVILTALFLRVKFSRSADAPAYQQGQNQLYNELNLGRREEYDVLDKRRGRDPEMGGKPQRRKNPQEGLYNELQKDKMAEAYSEIGMKGERRRGKGHDGLYQGLSTATKDTYDALHMQALPPRRAKRSGSGATNFSLLKQAGDVEENPGPTSMDWIWRILFLVGAATGAHSFEAQTVTQSQPEMSVQEAETVTLSCTYDTSESDYYLFWYKQPPSRQMILVIRQEAYKQQNATENRFSVNFQKAAKSFSLKISDSQLGDAAMYFCAYRSAVNARLMFGDGTQLVVKPNTRSQPHTKPSVFVMKNGTNVACLVKEFYPKDIRINLVSSKKITEFDPAIVISPSGKYNAVKLGKYEDSNSVTCSVQHDNKTVHSTDFGTQSFGLLDPKLCYLLDGILFIYGVILTALFLRVKFSRSADAPAYQQGQNQLYNELNLGRREEYDVLDKRRGRDPEMGGKPQRRKNPQEGLYNELQKDKMAEAYSEIGMKGERRRGKGHDGLYQGLSTATKDTYDALHMQALPPRRAKRSGSGVKQTLNFDLLKLAGDVESNPGPSRGHMTEYKPTVRLATRDDVPRAVRTLAAAFADYPATRHTVDPDRHIERVTELQELFLTRVGLDIGKVWVADDGAAVAVWTTPESVEAGAVFAEIGPRMAELSGSRLAAQQQMEGLLAPHRPKEPAWFLATVGVSPDHQGKGLGSAVVLPGVEAAERAGVPAFLETSAPRNLPFYERLGFTVTADVEVPEGPRTWCMTRKPGA

SEQ ID NO: 10628 - protein, 898 aa, -Artificial-Sequence
MALPVTALLLPLALLLHAARPEADIYQTPRYLVIGTGKKITLECSQTMGHDKMYWYQQDPGMELHLIHYSYGVNSTEKGDLSSESTVSRIRTEHFPLTLESARPSHTSQYLCASSEARGLAEFTDTQYFGPGTRLTVLEGQPKANPTVTLFPPSSEELQANKATLVCLISDFYPGAVTVAWKADGSPVKAGVETTKPSKQSNNKYAASSYLSLTPEQWKSHRSYSCQVTHEGSTVEKTVAPTECSTTPGERSSLPAFYPGTSGSCSGCGSLSLPLLAGLVAADAVASLLIVGAVFLCARPRRSPAQEDGKVYINMPGRGRAKRSGSGATNFSLLKQAGDVEENPGPTSMDWIWRILFLVGAATGAHSFEAQTVTQSQPEMSVQEAETVTLSCTYDTSESDYYLFWYKQPPSRQMILVIRQEAYKQQNATENRFSVNFQKAAKSFSLKISDSQLGDAAMYFCAYRSAVNARLMFGDGTQLVVKPNTRASTKGPSVFPLAPSSKSTSGGTAALGCLVKDYFPEPVTVSWNSGALTSGVHTFPAVLQSSGLYSLSSVVTVPSSSLGTQTYICNVNHKPSNTKVDKRVEPKSCTTPGERSSLPAFYPGTSGSCSGCGSLSLPLLAGLVAADAVASLLIVGAVFLCARPRRSPAQEDGKVYINMPGRGRAKRSGSGVKQTLNFDLLKLAGDVESNPGPSRGHMTEYKPTVRLATRDDVPRAVRTLAAAFADYPATRHTVDPDRHIERVTELQELFLTRVGLDIGKVWVADDGAAVAVWTTPESVEAGAVFAEIGPRMAELSGSRLAAQQQMEGLLAPHRPKEPAWFLATVGVSPDHQGKGLGSAVVLPGVEAAERAGVPAFLETSAPRNLPFYERLGFTVTADVEVPEGPRTWCMTRKPGAVD

SEQ ID NO: 10629 - protein, 725 aa, -Artificial-Sequence
MALPVTALLLPLALLLHAARPEADIYQTPRYLVIGTGKKITLECSQTMGHDKMYWYQQDPGMELHLIHYSYGVNSTEKGDLSSESTVSRIRTEHFPLTLESARPSHTSQYLCASSEARGLAEFTDTQYFGPGTRLTVLEGDIENTSLAPEDPTFPADTWGTYLLTTETGLQKDHALWDHTAQNLLRMGLAFLVLVALVWFLVEDWLSRKRTRERASRASTWEGRRRLNTQTLRAKRSGSGATNFSLLKQAGDVEENPGPTSMDWIWRILFLVGAATGAHSFEAQTVTQSQPEMSVQEAETVTLSCTYDTSESDYYLFWYKQPPSRQMILVIRQEAYKQQNATENRFSVNFQKAAKSFSLKISDSQLGDAAMYFCAYRSAVNARLMFGDGTQLVVKPNTRGDIENTSLAPEDPTFPADTWGTYLLTTETGLQKDHALWDHTAQNLLRMGLAFLVLVALVWFLVEDWLSRKRTRERASRASTWEGRRRLNTQTLRAKRSGSGVKQTLNFDLLKLAGDVESNPGPSRGHMTEYKPTVRLATRDDVPRAVRTLAAAFADYPATRHTVDPDRHIERVTELQELFLTRVGLDIGKVWVADDGAAVAVWTTPESVEAGAVFAEIGPRMAELSGSRLAAQQQMEGLLAPHRPKEPAWFLATVGVSPDHQGKGLGSAVVLPGVEAAERAGVPAFLETSAPRNLPFYERLGFTVTADVEVPEGPRTWCMTRKPGA

SEQ ID NO: 10630 - protein, 669 aa, -Artificial-Sequence
MALPVTALLLPLALLLHAARPEADIYQTPRYLVIGTGKKITLECSQTMGHDKMYWYQQDPGMELHLIHYSYGVNSTEKGDLSSESTVSRIRTEHFPLTLESARPSHTSQYLCASSEARGLAEFTDTQYFGPGTRLTVLEITQGLAVSTISSFFPPGYQVSFCLVMVLLFAVDTGLYFSVKTNIRSSTRDWKDHKFKWRKDPQDKRAKRSGSGATNFSLLKQAGDVEENPGPTSMDWIWRILFLVGAATGAHSFEAQTVTQSQPEMSVQEAETVTLSCTYDTSESDYYLFWYKQPPSRQMILVIRQEAYKQQNATENRFSVNFQKAAKSFSLKISDSQLGDAAMYFCAYRSAVNARLMFGDGTQLVVKPNTRITQGLAVSTISSFFPPGYQVSFCLVMVLLFAVDTGLYFSVKTNIRSSTRDWKDHKFKWRKDPQDKRAKRSGSGVKQTLNFDLLKLAGDVESNPGPSRGHMTEYKPTVRLATRDDVPRAVRTLAAAFADYPATRHTVDPDRHIERVTELQELFLTRVGLDIGKVWVADDGAAVAVWTTPESVEAGAVFAEIGPRMAELSGSRLAAQQQMEGLLAPHRPKEPAWFLATVGVSPDHQGKGLGSAVVLPGVEAAERAGVPAFLETSAPRNLPFYERLGFTVTADVEVPEGPRTWCMTRKPGA

SEQ ID NO: 10631 - protein, 905 aa, -Artificial-Sequence
MALPVTALLLPLALLLHAARPEADIYQTPRYLVIGTGKKITLECSQTMGHDKMYWYQQDPGMELHLIHYSYGVNSTEKGDLSSESTVSRIRTEHFPLTLESARPSHTSQYLCASSEARGLAEFTDTQYFGPGTRLTVLELWVSQPPEIRTLEGSSAFLPCSFNASQGRLAIGSVTWFRDEVVPGKEVRNGTPEFRGRLAPLASSRFLHDHQAELHIRDVRGHDASIYVCRVEVLGLGVGTGNGTRLVVEKEHPQLGAGTVLLLRAGFYAVSFLSVAVGSTVYYQGKCLTWKGPRRQLPAVVPAPLPPPCGSSAHLLPPVPGGRAKRSGSGATNFSLLKQAGDVEENPGPTSMDWIWRILFLVGAATGAHSFEAQTVTQSQPEMSVQEAETVTLSCTYDTSESDYYLFWYKQPPSRQMILVIRQEAYKQQNATENRFSVNFQKAAKSFSLKISDSQLGDAAMYFCAYRSAVNARLMFGDGTQLVVKPNTRLWVSQPPEIRTLEGSSAFLPCSFNASQGRLAIGSVTWFRDEVVPGKEVRNGTPEFRGRLAPLASSRFLHDHQAELHIRDVRGHDASIYVCRVEVLGLGVGTGNGTRLVVEKEHPQLGAGTVLLLRAGFYAVSFLSVAVGSTVYYQGKCLTWKGPRRQLPAVVPAPLPPPCGSSAHLLPPVPGGRAKRSGSGVKQTLNFDLLKLAGDVESNPGPSRGHMTEYKPTVRLATRDDVPRAVRTLAAAFADYPATRHTVDPDRHIERVTELQELFLTRVGLDIGKVWVADDGAAVAVWTTPESVEAGAVFAEIGPRMAELSGSRLAAQQQMEGLLAPHRPKEPAWFLATVGVSPDHQGKGLGSAVVLPGVEAAERAGVPAFLETSAPRNLPFYERLGFTVTADVEVPEGPRTWCMTRKPGA

SEQ ID NO: 10632 - protein, 905 aa, -Artificial-Sequence; identical to SEQ ID NO: 10631

SEQ ID NO: 10633 - protein, 801 aa, -Artificial-Sequence
MALPVTALLLPLALLLHAARPEADIYQTPRYLVIGTGKKITLECSQTMGHDKMYWYQQDPGMELHLIHYSYGVNSTEKGDLSSESTVSRIRTEHFPLTLESARPSHTSQYLCASSEARGLAEFTDTQYFGPGTRLTVGQPKANPTVTLFPPSSEELQANKATLVCLISDFYPGAVTVAWKADGSPVKAGVETTKPSKQSNNKYAASSYLSLTPEQWKSHRSYSCQVTHEGSTVEKTVAPTECSGSQSFGLLDPKLCYLLDGILFIYGVILTALFLRVKFSRSADAPAYQQGQNQLYNELNLGRREEYDVLDKRRGRDPEMGGKPQRRKNPQEGLYNELQKDKMAEAYSEIGMKGERRRGKGHDGLYQGLSTATKDTYDALHMQALPPRRAKRSGSGATNFSLLKQAGDVEENPGPTSMDWIWRILFLVGAATGAHSFEAQTVTQSQPEMSVQEAETVTLSCTYDTSESDYYLFWYKQPPSRQMILVIRQEAYKQQNATENRFSVNFQKAAKSFSLKISDSQLGDAAMYFCAYRSAVNARLMFGDGTQLVVKPNASTKGPSVFPLAPSSKSTSGGTAALGCLVKDYFPEPVTVSWNSGALTSGVHTFPAVLQSSGLYSLSSVVTVPSSSLGTQTYICNVNHKPSNTKVDKRVEPKSCGTQSFGLLDPKLCYLLDGILFIYGVILTALFLRVKFSRSADAPAYQQGQNQLYNELNLGRREEYDVLDKRRGRDPEMGGKPQRRKNPQEGLYNELQKDKMAEAYSEIGMKGERRRGKGHDGLYQGLSTATKDTYDALHMQALPPR

SEQ ID NO: 10634 - protein, 567 aa, -Artificial-Sequence
MALPVTALLLPLALLLHAARPEADIYQTPRYLVIGTGKKITLECSQTMGHDKMYWYQQDPGMELHLIHYSYGVNSTEKGDLSSESTVSRIRTEHFPLTLESARPSHTSQYLCASSEARGLAEFTDTQYFGPGTRLTVLEQSFGLLDPKLCYLLDGILFIYGVILTALFLRVKFSRSADAPAYQQGQNQLYNELNLGRREEYDVLDKRRGRDPEMGGKPQRRKNPQEGLYNELQKDKMAEAYSEIGMKGERRRGKGHDGLYQGLSTATKDTYDALHMQALPPRRAKRSGSGATNFSLLKQAGDVEENPGPTSMDWIWRILFLVGAATGAHSFEAQTVTQSQPEMSVQEAETVTLSCTYDTSESDYYLFWYKQPPSRQMILVIRQEAYKQQNATENRFSVNFQKAAKSFSLKISDSQLGDAAMYFCAYRSAVNARLMFGDGTQLVVKPNTRQSFGLLDPKLCYLLDGILFIYGVILTALFLRVKFSRSADAPAYQQGQNQLYNELNLGRREEYDVLDKRRGRDPEMGGKPQRRKNPQEGLYNELQKDKMAEAYSEIGMKGERRRGKGHD

SEQ ID NO: 10635 - protein, 915 aa, -Artificial-Sequence
MALPVTALLLPLALLLHAARPEADIYQTPRYLVIGTGKKITLECSQTMGHDKMYWYQQDPGMELHLIHYSYGVNSTEKGDLSSESTVSRIRTEHFPLTLESARPSHTSQYLCASSEARGLAEFTDTQYFGPGTRLTVLETTPGERSSLPAFYPGTSGSCSGCGSLSLPLLAGLVAADAVASLLIVGAVFLCARPRRSPAQEDGKVYINMPGRGSTSRVKFSRSADAPAYQQGQNQLYNELNLGRREEYDVLDKRRGRDPEMGGKPQRRKNPQEGLYNELQKDKMAEAYSEIGMKGERRRGKGHDGLYQGLSTATKDTYDALHMQALPPRRAKRSGSGATNFSLLKQAGDVEENPGPMDWIWRILFLVGAATGAHSFEAQTVTQSQPEMSVQEAETVTLSCTYDTSESDYYLFWYKQPPSRQMILVIRQEAYKQQNATENRFSVNFQKAAKSFSLKISDSQLGDAAMYFCAYRSAVNARLMFGDGTQLVVKPNTRTTPGERSSLPAFYPGTSGSCSGCGSLSLPLLAGLVAADAVASLLIVGAVFLCARPRRSPAQEDGKVYINMPGRGSSRRVKFSRSADAPAYQQGQNQLYNELNLGRREEYDVLDKRRGRDPEMGGKPQRRKNPQEGLYNELQKDKMAEAYSEIGMKGERRRGKGHDGLYQGLSTATKDTYDALHMQALPPRRAKRSGSGVKQTLNFDLLKLAGDVESNPGPGHMTEYKPTVRLATRDDVPRAVRTLAAAFADYPATRHTVDPDRHIERVTELQELFLTRVGLDIGKVWVADDGAAVAVWTTPESVEAGAVFAEIGPRMAELSGSRLAAQQQMEGLLAPHRPKEPAWFLATVGVSPDHQGKGLGSAVVLPGVEAAERAGVPAFLETSAPRNLPFYERLGFTVTADVEVPEGPRTWCMTRKPGA

SEQ ID NO: 10636 - protein, 915 aa, -Artificial-Sequence; identical to SEQ ID NO: 10635

SEQ ID NO: 10637 - protein, 1117 aa, -Artificial-Sequence
MALPVTALLLPLALLLHAARPEADIYQTPRYLVIGTGKKITLECSQTMGHDKMYWYQQDPGMELHLIHYSYGVNSTEKGDLSSESTVSRIRTEHFPLTLESARPSHTSQYLCASSEARGLAEFTDTQYFGPGTRLTVLEGQPKANPTVTLFPPSSEELQANKATLVCLISDFYPGAVTVAWKADGSPVKAGVETTKPSKQSNNKYAASSYLSLTPEQWKSHRSYSCQVTHEGSTVEKTVAPTECSGSTTPGERSSLPAFYPGTSGSCSGCGSLSLPLLAGLVAADAVASLLIVGAVFLCARPRRSPAQEDGKVYINMPGRGSTSRVKFSRSADAPAYQQGQNQLYNELNLGRREEYDVLDKRRGRDPEMGGKPQRRKNPQEGLYNELQKDKMAEAYSEIGMKGERRRGKGHDGLYQGLSTATKDTYDALHMQALPPRRAKRSGSGATNFSLLKQAGDVEENPGPMDWIWRILFLVGAATGAHSFEAQTVTQSQPEMSVQEAETVTLSCTYDTSESDYYLFWYKQPPSRQMILVIRQEAYKQQNATENRFSVNFQKAAKSFSLKISDSQLGDAAMYFCAYRSAVNARLMFGDGTQLVVKPNTRASTKGPSVFPLAPSSKSTSGGTAALGCLVKDYFPEPVTVSWNSGALTSGVHTFPAVLQSSGLYSLSSVVTVPSSSLGTQTYICNVNHKPSNTKVDKRVEPKSCGTTTPGERSSLPAFYPGTSGSCSGCGSLSLPLLAGLVAADAVASLLIVGAVFLCARPRRSPAQEDGKVYINMPGRGSSRRVKFSRSADAPAYQQGQNQLYNELNLGRREEYDVLDKRRGRDPEMGGKPQRRKNPQEGLYNELQKDKMAEAYSEIGMKGERRRGKGHDGLYQGLSTATKDTYDALHMQALPPRRAKRSGSGVKQTLNFDLLKLAGDVESNPGPGHMATYEVLCEVARKLGTDDREVVLFLLNVFIPQPTLAQLIGALRALKEEGRLTFPLLAECLFRAGRRDLLRDLLHLDPRFLERHLAGTMSYFSPYQLTVLHVDGELCARDIRSLIFLSKDTIGSRSTPQTFLHWVYCMENLDLLGPTDVDALMSMLRSLSRVDLQRQVQTLMGLHLSGPSHSQHYRHTP

SEQ ID NO: 10638 - protein, 1170 aa, -Artificial-Sequence
MALPVTALLLPLALLLHAARPEADIYQTPRYLVIGTGKKITLECSQTMGHDKMYWYQQDPGMELHLIHYSYGVNSTEKGDLSSESTVSRIRTEHFPLTLESARPSHTSQYLCASSEARGLAEFTDTQYFGPGTRLTVLEGQPKANPTVTLFPPSSEELQANKATLVCLISDFYPGAVTVAWKADGSPVKAGVETTKPSKQSNNKYAASSYLSLTPEQWKSHRSYSCQVTHEGSTVEKTVAPTECSGSTTPGERSSLPAFYPGTSGSCSGCGSLSLPLLAGLVAADAVASLLIVGAVFLCARPRRSPAQEDGKVYINMPGRGSTSRVKFSRSADAPAYQQGQNQLYNELNLGRREEYDVLDKRRGRDPEMGGKPQRRKNPQEGLYNELQKDKMAEAYSEIGMKGERRRGKGHDGLYQGLSTATKDTYDALHMQALPPRRAKRSGSGATNFSLLKQAGDVEENPGPMDWIWRILFLVGAATGAHSFEAQTVTQSQPEMSVQEAETVTLSCTYDTSESDYYLFWYKQPPSRQMILVIRQEAYKQQNATENRFSVNFQKAAKSFSLKISDSQLGDAAMYFCAYRSAVNARLMFGDGTQLVVKPNTRASTKGPSVFPLAPSSKSTSGGTAALGCLVKDYFPEPVTVSWNSGALTSGVHTFPAVLQSSGLYSLSSVVTVPSSSLGTQTYICNVNHKPSNTKVDKRVEPKSCGTTTPGERSSLPAFYPGTSGSCSGCGSLSLPLLAGLVAADAVASLLIVGAVFLCARPRRSPAQEDGKVYINMPGRGSSRRVKFSRSADAPAYQQGQNQLYNELNLGRREEYDVLDKRRGRDPEMGGKPQRRKNPQEGLYNELQKDKMAEAYSEIGMKGERRRGKGHDGLYQGLSTATKDTYDALHMQALPPRRAKRSGSGVKQTLNFDLLKLAGDVESNPGPGHMSDSKEVPSLPFLRHLLEELDSHEDSLLLFLCHDAAPGCTTVTQALCSLSQQRKLTLAALVEMLYVLQRMDLLKSRFGLSKEGAEQLLGTSFLTRYRKLMVCVGEELDSSELRALRLFACNLNPSLSTALSESSRFVELVLALENVGLVSPSSVSVLADMLRTLRRLDLCQQLVEYEQQEQARYRYCYAASPSLPVRTLRRGHGASEHEQLCMPVQESSDSPELLRTPVQESSSDSPEQTT

SEQ ID NO: 10639 - protein, 1128 aa, -Artificial-Sequence
MALPVTALLLPLALLLHAARPEADIYQTPRYLVIGTGKKITLECSQTMGHDKMYWYQQDPGMELHLIHYSYGVNSTEKGDLSSESTVSRIRTEHFPLTLESARPSHTSQYLCASSEARGLAEFTDTQYFGPGTRLTVLEGQPKANPTVTLFPPSSEELQANKATLVCLISDFYPGAVTVAWKADGSPVKAGVETTKPSKQSNNKYAASSYLSLTPEQWKSHRSYSCQVTHEGSTVEKTVAPTECSGSTTPGERSSLPAFYPGTSGSCSGCGSLSLPLLAGLVAADAVASLLIVGAVFLCARPRRSPAQEDGKVYINMPGRGSTSRVKFSRSADAPAYQQGQNQLYNELNLGRREEYDVLDKRRGRDPEMGGKPQRRKNPQEGLYNELQKDKMAEAYSEIGMKGERRRGKGHDGLYQGLSTATKDTYDALHMQALPPRRAKRSGSGATNFSLLKQAGDVEENPGPMDWIWRILFLVGAATGAHSFEAQTVTQSQPEMSVQEAETVTLSCTYDTSESDYYLFWYKQPPSRQMILVIRQEAYKQQNATENRFSVNFQKAAKSFSLKISDSQLGDAAMYFCAYRSAVNARLMFGDGTQLVVKPNTRASTKGPSVFPLAPSSKSTSGGTAALGCLVKDYFPEPVTVSWNSGALTSGVHTFPAVLQSSGLYSLSSVVTVPSSSLGTQTYICNVNHKPSNTKVDKRVEPKSCGTTTPGERSSLPAFYPGTSGSCSGCGSLSLPLLAGLVAADAVASLLIVGAVFLCARPRRSPAQEDGKVYINMPGRGSSRRVKFSRSADAPAYQQGQNQLYNELNLGRREEYDVLDKRRGRDPEMGGKPQRRKNPQEGLYNELQKDKMAEAYSEIGMKGERRRGKGHDGLYQGLSTATKDTYDALHMQALPPRRAKRSGSGVKQTLNFDLLKLAGDVESNPGPGHMTEYKPTVRLATRDDVPRAVRTLAAAFADYPATRHTVDPDRHIERVTELQELFLTRVGLDIGKVWVADDGAAVAVWTTPESVEAGAVFAEIGPRMAELSGSRLAAQQQMEGLLAPHRPKEPAWFLATVGVSPDHQGKGLGSAVVLPGVEAAERAGVPAFLETSAPRNLPFYERLGFTVTADVEVPEGPRTWCMTRKPGA

SEQ ID NO: 10640 - protein, 1265 aa, -Artificial-Sequence
MALPVTALLLPLALLLHAARPEVQLVESGGGLVQAGGSLRLSCAASGRTFSMGWFRQAPGKEREFVAAITYSGGSPYYADSVKGRFTISRDNAKNTVYLQMNSLKPEDTAVYYCAANPTYGSDWNAENWGQGTQVTVSSGTGGGGSGGGGSGGGGSEFEADIYQTPRYLVIGTGKKITLECSQTMGHDKMYWYQQDPGMELHLIHYSYGVNSTEKGDLSSESTVSRIRTEHFPLTLESARPSHTSQYLCASSEARGLAEFTDTQYFGPGTRLTVLEGQPKANPTVTLFPPSSEELQANKATLVCLISDFYPGAVTVAWKADGSPVKAGVETTKPSKQSNNKYAASSYLSLTPEQWKSHRSYSCQVTHEGSTVEKTVAPTECSGSTTPGERSSLPAFYPGTSGSCSGCGSLSLPLLAGLVAADAVASLLIVGAVFLCARPRRSPAQEDGKVYINMPGRGSTSRVKFSRSADAPAYQQGQNQLYNELNLGRREEYDVLDKRRGRDPEMGGKPQRRKNPQEGLYNELQKDKMAEAYSEIGMKGERRRGKGHDGLYQGLSTATKDTYDALHMQALPPRRAKRSGSGATNFSLLKQAGDVEENPGPMDWIWRILFLVGAATGAHSFEAQTVTQSQPEMSVQEAETVTLSCTYDTSESDYYLFWYKQPPSRQMILVIRQEAYKQQNATENRFSVNFQKAAKSFSLKISDSQLGDAAMYFCAYRSAVNARLMFGDGTQLVVKPNTRASTKGPSVFPLAPSSKSTSGGTAALGCLVKDYFPEPVTVSWNSGALTSGVHTFPAVLQSSGLYSLSSVVTVPSSSLGTQTYICNVNHKPSNTKVDKRVEPKSCGTTTPGERSSLPAFYPGTSGSCSGCGSLSLPLLAGLVAADAVASLLIVGAVFLCARPRRSPAQEDGKVYINMPGRGSSRRVKFSRSADAPAYQQGQNQLYNELNLGRREEYDVLDKRRGRDPEMGGKPQRRKNPQEGLYNELQKDKMAEAYSEIGMKGERRRGKGHDGLYQGLSTATKDTYDALHMQALPPRRAKRSGSGVKQTLNFDLLKLAGDVESNPGPGHMTEYKPTVRLATRDDVPRAVRTLAAAFADYPATRHTVDPDRHIERVTELQELFLTRVGLDIGKVWVADDGAAVAVWTTPESVEAGAVFAEIGPRMAELSGSRLAAQQQMEGLLAPHRPKEPAWFLATVGVSPDHQGKGLGSAVVLPGVEAAERAGVPAFLETSAPRNLPFYERLGFTVTADVEVPEGPRTWCMTRKPGA

SEQ ID NO: 10641 - protein, 1402 aa, -Artificial-Sequence
MALPVTALLLPLALLLHAARPEVQLVESGGGLVQAGGSLRLSCAASGRTFSMGWFRQAPGKEREFVAAITYSGGSPYYADSVKGRFTISRDNAKNTVYLQMNSLKPEDTAVYYCAANPTYGSDWNAENWGQGTQVTVSSGTGGGGSGGGGSGGGGSEFEADIYQTPRYLVIGTGKKITLECSQTMGHDKMYWYQQDPGMELHLIHYSYGVNSTEKGDLSSESTVSRIRTEHFPLTLESARPSHTSQYLCASSEARGLAEFTDTQYFGPGTRLTVLEGQPKANPTVTLFPPSSEELQANKATLVCLISDFYPGAVTVAWKADGSPVKAGVETTKPSKQSNNKYAASSYLSLTPEQWKSHRSYSCQVTHEGSTVEKTVAPTECSGSTTPGERSSLPAFYPGTSGSCSGCGSLSLPLLAGLVAADAVASLLIVGAVFLCARPRRSPAQEDGKVYINMPGRGSTSRVKFSRSADAPAYQQGQNQLYNELNLGRREEYDVLDKRRGRDPEMGGKPQRRKNPQEGLYNELQKDKMAEAYSEIGMKGERRRGKGHDGLYQGLSTATKDTYDALHMQALPPRRAKRSGSGATNFSLLKQAGDVEENPGPMDWIWRILFLVGAATGAHSGPEVQLVESGGGLVQAGGSLRLSCAASGRTFTMGWFRQAPGKEREFVAAISLSPTLAYYADSVKGRFTISRDNAKNTVVLQMNSLKPEDTALYYCAADRKSVMSIRPDYWGQGTQVTVSSGSGGGGSGGGGSGGGGSFEAQTVTQSQPEMSVQEAETVTLSCTYDTSESDYYLFWYKQPPSRQMILVIRQEAYKQQNATENRFSVNFQKAAKSFSLKISDSQLGDAAMYFCAYRSAVNARLMFGDGTQLVVKPNTRASTKGPSVFPLAPSSKSTSGGTAALGCLVKDYFPEPVTVSWNSGALTSGVHTFPAVLQSSGLYSLSSVVTVPSSSLGTQTYICNVNHKPSNTKVDKRVEPKSCGTTTPGERSSLPAFYPGTSGSCSGCGSLSLPLLAGLVAADAVASLLIVGAVFLCARPRRSPAQEDGKVYINMPGRGSSRRVKFSRSADAPAYQQGQNQLYNELNLGRREEYDVLDKRRGRDPEMGGKPQRRKNPQEGLYNELQKDKMAEAYSEIGMKGERRRGKGHDGLYQGLSTATKDTYDALHMQALPPRRAKRSGSGVKQTLNFDLLKLAGDVESNPGPGHMTEYKPTVRLATRDDVPRAVRTLAAAFADYPATRHTVDPDRHIERVTELQELFLTRVGLDIGKVWVADDGAAVAVWTTPESVEAGAVFAEIGPRMAELSGSRLAAQQQMEGLLAPHRPKEPAWFLATVGVSPDHQGKGLGSAVVLPGVEAAERAGVPAFLETSAPRNLPFYERLGFTVTADVEVPEGPRTWCMTRKPGA

SEQ ID NO: 10642 - protein, 822 aa, -Artificial-Sequence
MALPVTALLLPLALLLHAARPEFEADIYQTPRYLVIGTGKKITLECSQTMGHDKMYWYQQDPGMELHLIHYSYGVNSTEKGDLSSESTVSRIRTEHFPLTLESARPSHTSQYLCASSEARGLAEFTDTQYFGPGTRLTVLEDLKNVFPPEVAVFEPSEAEISHTQKATLVCLATGFYPDHVELSWWVNGKEVHSGVSTDPQPLKEQPALNDSRYCLSSRLRVSATFWQNPRNHFRCQVQFYGLSENDEWTQDRAKPVTQIVSAEAWGRADCGSQSFGLLDPKLCYLLDGILFIYGVILTALFLRVKFSRSADAPAYQQGQNQLYNELNLGRREEYDVLDKRRGRDPEMGGKPQRRKNPQEGLYNELQKDKMAEAYSEIGMKGERRRGKGHDGLYQGLSTATKDTYDALHMQALPPRRAKRSGSGATNFSLLKQAGDVEENPGPTSMDWIWRILFLVGAATGAHSFEAQTVTQSQPEMSVQEAETVTLSCTYDTSESDYYLFWYKQPPSRQMILVIRQEAYKQQNATENRFSVNFQKAAKSFSLKISDSQLGDAAMYFCAYRSAVNARLMFGDGTQLVVKPNTRIQNPDPAVYQLRDSKSSDKSVCLFTDFDSQTNVSQSKDSDVYITDKTVLDMRSMDFKSNSAVAWSNKSDFACANAFNNSIIPEDTFFPSPESSCGTQSFGLLDPKLCYLLDGILFIYGVILTALFLRVKFSRSADAPAYQQGQNQLYNELNLGRREEYDVLDKRRGRDPEMGGKPQRRKNPQEGLYNELQKDKMAEAYSEIGMKGERRRGKGHDGLYQGLSTATKDTYDALHMQALPPR

SEQ ID NO: 10643 - protein, 864 aa, -Artificial-Sequence
MALPVTALLLPLALLLHAARPEFEADIYQTPRYLVIGTGKKITLECSQTMGHDKMYWYQQDPGMELHLIHYSYGVNSTEKGDLSSESTVSRIRTEHFPLTLESARPSHTSQYLCASSEARGLAEFTDTQYFGPGTRLTVLEDLKNVFPPEVAVFEPSEAEISHTQKATLVCLATGFYPDHVELSWWVNGKEVHSGVSTDPQPLKEQPALNDSRYCLSSRLRVSATFWQNPRNHFRCQVQFYGLSENDEWTQDRAKPVTQIVSAEAWGRADCGSQSFGLLDPKLCYLLDGILFIYGVILTALFLRVKFSRSADAPAYQQGQNQLYNELNLGRREEYDVLDKRRGRDPEMGGKPQRRKNPQEGLYNELQKDKMAEAYSEIGMKGERRRGKGHDGLYQGLSTATKDTYDALHMQALPPRRAKRSGSGATNFSLLKQAGDVEENPGPTSMDWIWRILFLVGAATGAHSFEAQTVTQSQPEMSVQEAETVTLSCTYDTSESDYYLFWYKQPPSRQMILVIRQEAYKQQNATENRFSVNFQKAAKSFSLKISDSQLGDAAMYFCAYRSAVNARLMFGDGTQLVVKPNTRIQNPDPAVYQLRDSKSSDKSVCLFTDFDSQTNVSQSKDSDVYITDKTVLDMRSMDFKSNSAVAWSNKSDFACANAFNNSIIPEDTFFPSPESSCGTQSFGLLDPKLCYLLDGILFIYGVILTALFLKRGRKKLLYIFKQPFMRPVQTTQEEDGCSCRFPEEEEGGCELRVKFSRSADAPAYQQGQNQLYNELNLGRREEYDVLDKRRGRDPEMGGKPQRRKNPQEGLYNELQKDKMAEAYSEIGMKGERRRGKGHDGLYQGLSTATKDTYDALHMQALPPR

SEQ ID NO: 10644 - protein, 863 aa, -Artificial-Sequence
MALPVTALLLPLALLLHAARPEFEADIYQTPRYLVIGTGKKITLECSQTMGHDKMYWYQQDPGMELHLIHYSYGVNSTEKGDLSSESTVSRIRTEHFPLTLESARPSHTSQYLCASSEARGLAEFTDTQYFGPGTRLTVLEDLKNVFPPEVAVFEPSEAEISHTQKATLVCLATGFYPDHVELSWWVNGKEVHSGVSTDPQPLKEQPALNDSRYCLSSRLRVSATFWQNPRNHFRCQVQFYGLSENDEWTQDRAKPVTQIVSAEAWGRADCGSQSFGLLDPKLCYLLDGILFIYGVILTALFLRVKFSRSADAPAYQQGQNQLYNELNLGRREEYDVLDKRRGRDPEMGGKPQRRKNPQEGLYNELQKDKMAEAYSEIGMKGERRRGKGHDGLYQGLSTATKDTYDALHMQALPPRRAKRSGSGATNFSLLKQAGDVEENPGPTSMDWIWRILFLVGAATGAHSFEAQTVTQSQPEMSVQEAETVTLSCTYDTSESDYYLFWYKQPPSRQMILVIRQEAYKQQNATENRFSVNFQKAAKSFSLKISDSQLGDAAMYFCAYRSAVNARLMFGDGTQLVVKPNTRIQNPDPAVYQLRDSKSSDKSVCLFTDFDSQTNVSQSKDSDVYITDKTVLDMRSMDFKSNSAVAWSNKSDFACANAFNNSIIPEDTFFPSPESSCGTQSFGLLDPKLCYLLDGILFIYGVILTALFLRSKRSRLLHSDYMNMTPRRPGPTRKHYQPYAPPRDFAAYRSRVKFSRSADAPAYQQGQNQLYNELNLGRREEYDVLDKRRGRDPEMGGKPQRRKNPQEGLYNELQKDKMAEAYSEIGMKGERRRGKGHDGLYQGLSTATKDTYDALHMQALPPR

SEQ ID NO: 10645 - protein, 858 aa, -Artificial-Sequence
MALPVTALLLPLALLLHAARPEFEADIYQTPRYLVIGTGKKITLECSQTMGHDKMYWYQQDPGMELHLIHYSYGVNSTEKGDLSSESTVSRIRTEHFPLTLESARPSHTSQYLCASSEARGLAEFTDTQYFGPGTRLTVLEDLKNVFPPEVAVFEPSEAEISHTQKATLVCLATGFYPDHVELSWWVNGKEVHSGVSTDPQPLKEQPALNDSRYCLSSRLRVSATFWQNPRNHFRCQVQFYGLSENDEWTQDRAKPVTQIVSAEAWGRADCGSQSFGLLDPKLCYLLDGILFIYGVILTALFLRVKFSRSADAPAYQQGQNQLYNELNLGRREEYDVLDKRRGRDPEMGGKPQRRKNPQEGLYNELQKDKMAEAYSEIGMKGERRRGKGHDGLYQGLSTATKDTYDALHMQALPPRRAKRSGSGATNFSLLKQAGDVEENPGPTSMDWIWRILFLVGAATGAHSFEAQTVTQSQPEMSVQEAETVTLSCTYDTSESDYYLFWYKQPPSRQMILVIRQEAYKQQNATENRFSVNFQKAAKSFSLKISDSQLGDAAMYFCAYRSAVNARLMFGDGTQLVVKPNTRIQNPDPAVYQLRDSKSSDKSVCLFTDFDSQTNVSQSKDSDVYITDKTVLDMRSMDFKSNSAVAWSNKSDFACANAFNNSIIPEDTFFPSPESSCGTQSFGLLDPKLCYLLDGILFIYGVILTALFLRDQRLPPDAHKPPGGGSFRTPIQEEQADAHSTLAKIRVKFSRSADAPAYQQGQNQLYNELNLGRREEYDVLDKRRGRDPEMGGKPQRRKNPQEGLYNELQKDKMAEAYSEIGMKGERRRGKGHDGLYQGLSTATKDTYDALHMQALPPR

SEQ ID NO: 10646 - protein, 942 aa, -Artificial-Sequence
MALPVTALLLPLALLLHAARPEFEADIYQTPRYLVIGTGKKITLECSQTMGHDKMYWYQQDPGMELHLIHYSYGVNSTEKGDLSSESTVSRIRTEHFPLTLESARPSHTSQYLCASSEARGLAEFTDTQYFGPGTRLTVLEDLKNVFPPEVAVFEPSEAEISHTQKATLVCLATGFYPDHVELSWWVNGKEVHSGVSTDPQPLKEQPALNDSRYCLSSRLRVSATFWQNPRNHFRCQVQFYGLSENDEWTQDRAKPVTQIVSAEAWGRADCGSQSFGLLDPKLCYLLDGILFIYGVILTALFLRVKFSRSADAPAYQQGQNQLYNELNLGRREEYDVLDKRRGRDPEMGGKPQRRKNPQEGLYNELQKDKMAEAYSEIGMKGERRRGKGHDGLYQGLSTATKDTYDALHMQALPPRRAKRSGSGATNFSLLKQAGDVEENPGPTSMDWIWRILFLVGAATGAHSFEAQTVTQSQPEMSVQEAETVTLSCTYDTSESDYYLFWYKQPPSRQMILVIRQEAYKQQNATENRFSVNFQKAAKSFSLKISDSQLGDAAMYFCAYRSAVNARLMFGDGTQLVVKPNTRIQNPDPAVYQLRDSKSSDKSVCLFTDFDSQTNVSQSKDSDVYITDKTVLDMRSMDFKSNSAVAWSNKSDFACANAFNNSIIPEDTFFPSPESSCGTQSFGLLDPKLCYLLDGILFIYGVILTALFLWRRKRKEKQSETSPKEFLTIYEDVKDLKTRRNHEQEQTFPGGGSTIYSMIQSQSSAPTSQEPAYTLYSLIQPSRKSGSRKRNHSPSFNSTIYEVIGKSQPKAQNPARLSRKELENFDVYSRVKFSRSADAPAYQQGQNQLYNELNLGRREEYDVLDKRRGRDPEMGGKPQRRKNPQEGLYNELQKDKMAEAYSEIGMKGERRRGKGHDGLYQGLSTATKDTYDALHMQALPPR

SEQ ID NO: 10647 - protein, 905 aa, -Artificial-Sequence
MALPVTALLLPLALLLHAARPEFEADIYQTPRYLVIGTGKKITLECSQTMGHDKMYWYQQDPGMELHLIHYSYGVNSTEKGDLSSESTVSRIRTEHFPLTLESARPSHTSQYLCASSEARGLAEFTDTQYFGPGTRLTVLEDLKNVFPPEVAVFEPSEAEISHTQKATLVCLATGFYPDHVELSWWVNGKEVHSGVSTDPQPLKEQPALNDSRYCLSSRLRVSATFWQNPRNHFRCQVQFYGLSENDEWTQDRAKPVTQIVSAEAWGRADCGSQSFGLLDPKLCYLLDGILFIYGVILTALFLRSKRSRLLHSDYMNMTPRRPGPTRKHYQPYAPPRDFAAYRSRVKFSRSADAPAYQQGQNQLYNELNLGRREEYDVLDKRRGRDPEMGGKPQRRKNPQEGLYNELQKDKMAEAYSEIGMKGERRRGKGHDGLYQGLSTATKDTYDALHMQALPPRRAKRSGSGATNFSLLKQAGDVEENPGPTSMDWIWRILFLVGAATGAHSFEAQTVTQSQPEMSVQEAETVTLSCTYDTSESDYYLFWYKQPPSRQMILVIRQEAYKQQNATENRFSVNFQKAAKSFSLKISDSQLGDAAMYFCAYRSAVNARLMFGDGTQLVVKPNTRIQNPDPAVYQLRDSKSSDKSVCLFTDFDSQTNVSQSKDSDVYITDKTVLDMRSMDFKSNSAVAWSNKSDFACANAFNNSIIPEDTFFPSPESSCGTQSFGLLDPKLCYLLDGILFIYGVILTALFLKRGRKKLLYIFKQPFMRPVQTTQEEDGCSCRFPEEEEGGCELRVKFSRSADAPAYQQGQNQLYNELNLGRREEYDVLDKRRGRDPEMGGKPQRRKNPQEGLYNELQKDKMAEAYSEIGMKGERRRGKGHDGLYQGLSTATKDTYDALHMQALPPR

SEQ ID NO: 10648 - protein, 904 aa, -Artificial-Sequence
MALPVTALLLPLALLLHAARPEFEADIYQTPRYLVIGTGKKITLECSQTMGHDKMYWYQQDPGMELHLIHYSYGVNSTEKGDLSSESTVSRIRTEHFPLTLESARPSHTSQYLCASSEARGLAEFTDTQYFGPGTRLTVLEDLKNVFPPEVAVFEPSEAEISHTQKATLVCLATGFYPDHVELSWWVNGKEVHSGVSTDPQPLKEQPALNDSRYCLSSRLRVSATFWQNPRNHFRCQVQFYGLSENDEWTQDRAKPVTQIVSAEAWGRADCGSQSFGLLDPKLCYLLDGILFIYGVILTALFLRSKRSRLLHSDYMNMTPRRPGPTRKHYQPYAPPRDFAAYRSRVKFSRSADAPAYQQGQNQLYNELNLGRREEYDVLDKRRGRDPEMGGKPQRRKNPQEGLYNELQKDKMAEAYSEIGMKGERRRGKGHDGLYQGLSTATKDTYDALHMQALPPRRAKRSGSGATNFSLLKQAGDVEENPGPTSMDWIWRILFLVGAATGAHSFEAQTVTQSQPEMSVQEAETVTLSCTYDTSESDYYLFWYKQPPSRQMILVIRQEAYKQQNATENRFSVNFQKAAKSFSLKISDSQLGDAAMYFCAYRSAVNARLMFGDGTQLVVKPNTRIQNPDPAVYQLRDSKSSDKSVCLFTDFDSQTNVSQSKDSDVYITDKTVLDMRSMDFKSNSAVAWSNKSDFACANAFNNSIIPEDTFFPSPESSCGTQSFGLLDPKLCYLLDGILFIYGVILTALFLRSKRSRLLHSDYMNMTPRRPGPTRKHYQPYAPPRDFAAYRSRVKFSRSADAPAYQQGQNQLYNELNLGRREEYDVLDKRRGRDPEMGGKPQRRKNPQEGLYNELQKDKMAEAYSEIGMKGERRRGKGHDGLYQGLSTATKDTYDALHMQALPPR

SEQ ID NO: 10649 - protein, 905 aa, -Artificial-Sequence; identical to SEQ ID NO: 10647

SEQ ID NO: 10650 - protein, 822 aa, -Artificial-Sequence
MALPVTALLLPLALLLHAARPEFEADIYQTPRYLVIGTGKKITLECSQTMGHDKMYWYQQDPGMELHLIHYSYGVNSTEKGDLSSESTVSRIRTEHFPLTLESARPSHTSQYLCASSEARGLAEFTDTQYFGPGTRLTVLEDLKNVFPPEVAVFEPSEAEISHTQKATLVCLATGFYPDHVELSWWVNGKEVHSGVSTDPQPLKEQPALNDSRYCLSSRLRVSATFWQNPRNHFRCQVQFYGLSENDEWTQDRAKPVTQIVSAEAWGRADCGSQSFGLLDPKLCYLLDGILFIYGVILTALFLRVKFSRSADAPAYQQGQNQLYNELNLGRREEYDVLDKRRGRDPEMGGKPQRRKNPQEGLFNELQKDKMAEAFSEIGMKGERRRGKGHDGLFQGLSTATKDTFDALHMQALPPRRAKRSGSGATNFSLLKQAGDVEENPGPTSMDWIWRILFLVGAATGAHSFEAQTVTQSQPEMSVQEAETVTLSCTYDTSESDYYLFWYKQPPSRQMILVIRQEAYKQQNATENRFSVNFQKAAKSFSLKISDSQLGDAAMYFCAYRSAVNARLMFGDGTQLVVKPNTRIQNPDPAVYQLRDSKSSDKSVCLFTDFDSQTNVSQSKDSDVYITDKTVLDMRSMDFKSNSAVAWSNKSDFACANAFNNSIIPEDTFFPSPESSCGTQSFGLLDPKLCYLLDGILFIYGVILTALFLRVKFSRSADAPAYQQGQNQLYNELNLGRREEYDVLDKRRGRDPEMGGKPQRRKNPQEGLYNELQKDKMAEAYSEIGMKGERRRGKGHDGLYQGLSTATKDTYDALHMQALPPR

SEQ ID NO: 10651 - protein, 822 aa, -Artificial-Sequence; identical to SEQ ID NO: 10650

SEQ ID NO: 10652 - protein, 864 aa, -Artificial-Sequence
MALPVTALLLPLALLLHAARPEFEADIYQTPRYLVIGTGKKITLECSQTMGHDKMYWYQQDPGMELHLIHYSYGVNSTEKGDLSSESTVSRIRTEHFPLTLESARPSHTSQYLCASSEARGLAEFTDTQYFGPGTRLTVLEDLKNVFPPEVAVFEPSEAEISHTQKATLVCLATGFYPDHVELSWWVNGKEVHSGVSTDPQPLKEQPALNDSRYCLSSRLRVSATFWQNPRNHFRCQVQFYGLSENDEWTQDRAKPVTQIVSAEAWGRADCGSQSFGLLDPKLCYLLDGILFIYGVILTALFLRVKFSRSADAPAYQQGQNQLYNELNLGRREEYDVLDKRRGRDPEMGGKPQRRKNPQEGLFNELQKDKMAEAFSEIGMKGERRRGKGHDGLFQGLSTATKDTFDALHMQALPPRRAKRSGSGATNFSLLKQAGDVEENPGPTSMDWIWRILFLVGAATGAHSFEAQTVTQSQPEMSVQEAETVTLSCTYDTSESDYYLFWYKQPPSRQMILVIRQEAYKQQNATENRFSVNFQKAAKSFSLKISDSQLGDAAMYFCAYRSAVNARLMFGDGTQLVVKPNTRIQNPDPAVYQLRDSKSSDKSVCLFTDFDSQTNVSQSKDSDVYITDKTVLDMRSMDFKSNSAVAWSNKSDFACANAFNNSIIPEDTFFPSPESSCGTQSFGLLDPKLCYLLDGILFIYGVILTALFLKRGRKKLLYIFKQPFMRPVQTTQEEDGCSCRFPEEEEGGCELRVKFSRSADAPAYQQGQNQLYNELNLGRREEYDVLDKRRGRDPEMGGKPQRRKNPQEGLYNELQKDKMAEAYSEIGMKGERRRGKGHDGLYQGLSTATKDTYDALHMQALPPR

SEQ ID NO: 10653 - protein, 863 aa, -Artificial-Sequence
MALPVTALLLPLALLLHAARPEFEADIYQTPRYLVIGTGKKITLECSQTMGHDKMYWYQQDPGMELHLIHYSYGVNSTEKGDLSSESTVSRIRTEHFPLTLESARPSHTSQYLCASSEARGLAEFTDTQYFGPGTRLTVLEDLKNVFPPEVAVFEPSEAEISHTQKATLVCLATGFYPDHVELSWWVNGKEVHSGVSTDPQPLKEQPALNDSRYCLSSRLRVSATFWQNPRNHFRCQVQFYGLSENDEWTQDRAKPVTQIVSAEAWGRADCGSQSFGLLDPKLCYLLDGILFIYGVILTALFLRVKFSRSADAPAYQQGQNQLYNELNLGRREEYDVLDKRRGRDPEMGGKPQRRKNPQEGLFNELQKDKMAEAFSEIGMKGERRRGKGHDGLFQGLSTATKDTFDALHMQALPPRRAKRSGSGATNFSLLKQAGDVEENPGPTSMDWIWRILFLVGAATGAHSFEAQTVTQSQPEMSVQEAETVTLSCTYDTSESDYYLFWYKQPPSRQMILVIRQEAYKQQNATENRFSVNFQKAAKSFSLKISDSQLGDAAMYFCAYRSAVNARLMFGDGTQLVVKPNTRIQNPDPAVYQLRDSKSSDKSVCLFTDFDSQTNVSQSKDSDVYITDKTVLDMRSMDFKSNSAVAWSNKSDFACANAFNNSIIPEDTFFPSPESSCGTQSFGLLDPKLCYLLDGILFIYGVILTALFLRSKRSRLLHSDYMNMTPRRPGPTRKHYQPYAPPRDFAAYRSRVKFSRSADAPAYQQGQNQLYNELNLGRREEYDVLDKRRGRDPEMGGKPQRRKNPQEGLYNELQKDKMAEAYSEIGMKGERRRGKGHDGLYQGLSTATKDTYDALHMQALPPR

SEQ ID NO: 10654 - protein, 858 aa, -Artificial-Sequence
MALPVTALLLPLALLLHAARPEFEADIYQTPRYLVIGTGKKITLECSQTMGHDKMYWYQQDPGMELHLIHYSYGVNSTEKGDLSSESTVSRIRTEHFPLTLESARPSHTSQYLCASSEARGLAEFTDTQYFGPGTRLTVLEDLKNVFPPEVAVFEPSEAEISHTQKATLVCLATGFYPDHVELSWWVNGKEVHSGVSTDPQPLKEQPALNDSRYCLSSRLRVSATFWQNPRNHFRCQVQFYGLSENDEWTQDRAKPVTQIVSAEAWGRADCGSQSFGLLDPKLCYLLDGILFIYGVILTALFLRVKFSRSADAPAYQQGQNQLYNELNLGRREEYDVLDKRRGRDPEMGGKPQRRKNPQEGLFNELQKDKMAEAFSEIGMKGERRRGKGHDGLFQGLSTATKDTFDALHMQALPPRRAKRSGSGATNFSLLKQAGDVEENPGPTSMDWIWRILFLVGAATGAHSFEAQTVTQSQPEMSVQEAETVTLSCTYDTSESDYYLFWYKQPPSRQMILVIRQEAYKQQNATENRFSVNFQKAAKSFSLKISDSQLGDAAMYFCAYRSAVNARLMFGDGTQLVVKPNTRIQNPDPAVYQLRDSKSSDKSVCLFTDFDSQTNVSQSKDSDVYITDKTVLDMRSMDFKSNSAVAWSNKSDFACANAFNNSIIPEDTFFPSPESSCGTQSFGLLDPKLCYLLDGILFIYGVILTALFLRDQRLPPDAHKPPGGGSFRTPIQEEQADAHSTLAKIRVKFSRSADAPAYQQGQNQLYNELNLGRREEYDVLDKRRGRDPEMGGKPQRRKNPQEGLYNELQKDKMAEAYSEIGMKGERRRGKGHDGLYQGLSTATKDTYDALHMQALPPR

SEQ ID NO: 10655 - protein, 942 aa, -Artificial-Sequence
MALPVTALLLPLALLLHAARPEFEADIYQTPRYLVIGTGKKITLECSQTMGHDKMYWYQQDPGMELHLIHYSYGVNSTEKGDLSSESTVSRIRTEHFPLTLESARPSHTSQYLCASSEARGLAEFTDTQYFGPGTRLTVLEDLKNVFPPEVAVFEPSEAEISHTQKATLVCLATGFYPDHVELSWWVNGKEVHSGVSTDPQPLKEQPALNDSRYCLSSRLRVSATFWQNPRNHFRCQVQFYGLSENDEWTQDRAKPVTQIVSAEAWGRADCGSQSFGLLDPKLCYLLDGILFIYGVILTALFLRVKFSRSADAPAYQQGQNQLYNELNLGRREEYDVLDKRRGRDPEMGGKPQRRKNPQEGLFNELQKDKMAEAFSEIGMKGERRRGKGHDGLFQGLSTATKDTFDALHMQALPPRRAKRSGSGATNFSLLKQAGDVEENPGPTSMDWIWRILFLVGAATGAHSFEAQTVTQSQPEMSVQEAETVTLSCTYDTSESDYYLFWYKQPPSRQMILVIRQEAYKQQNATENRFSVNFQKAAKSFSLKISDSQLGDAAMYFCAYRSAVNARLMFGDGTQLVVKPNTRIQNPDPAVYQLRDSKSSDKSVCLFTDFDSQTNVSQSKDSDVYITDKTVLDMRSMDFKSNSAVAWSNKSDFACANAFNNSIIPEDTFFPSPESSCGTQSFGLLDPKLCYLLDGILFIYGVILTALFLWRRKRKEKQSETSPKEFLTIYEDVKDLKTRRNHEQEQTFPGGGSTIYSMIQSQSSAPTSQEPAYTLYSLIQPSRKSGSRKRNHSPSFNSTIYEVIGKSQPKAQNPARLSRKELENFDVYSRVKFSRSADAPAYQQGQNQLYNELNLGRREEYDVLDKRRGRDPEMGGKPQRRKNPQEGLYNELQKDKMAEAYSEIGMKGERRRGKGHDGLYQGLSTATKDTYDALHMQALPPR

SEQ ID NO: 10656 - protein, 863 aa, -Artificial-Sequence; identical to SEQ ID NO: 10653

SEQ ID NO: 10657 - protein, 864 aa, -Artificial-Sequence; identical to SEQ ID NO: 10652

SEQ ID NO: 10658 - protein, 822 aa, -Artificial-Sequence
MALPVTALLLPLALLLHAARPEFEADIYQTPRYLVIGTGKKITLECSQTMGHDKMYWYQQDPGMELHLIHYSYGVNSTEKGDLSSESTVSRIRTEHFPLTLESARPSHTSQYLCASSEARGLAEFTDTQYFGPGTRLTVLEDLKNVFPPEVAVFEPSEAEISHTQKATLVCLATGFYPDHVELSWWVNGKEVHSGVSTDPQPLKEQPALNDSRYCLSSRLRVSATFWQNPRNHFRCQVQFYGLSENDEWTQDRAKPVTQIVSAEAWGRADCGSQSFGLLDPKLCYLLDGILFIYGVILTALFLRVKFSRSADAPAYQQGQNQLYNELNLGRREEYDVLDKRRGRDPEMGGKPQRRKNPQEGLFNELQKDKMAEAFSEIGMKGERRRGKGHDGLFQGLSTATKDTFDALHMQALPPRRAKRSGSGATNFSLLKQAGDVEENPGPTSMDWIWRILFLVGAATGAHSFEAQTVTQSQPEMSVQEAETVTLSCTYDTSESDYYLFWYKQPPSRQMILVIRQEAYKQQNATENRFSVNFQKAAKSFSLKISDSQLGDAAMYFCAYRSAVNARLMFGDGTQLVVKPNTRIQNPDPAVYQLRDSKSSDKSVCLFTDFDSQTNVSQSKDSDVYITDKTVLDMRSMDFKSNSAVAWSNKSDFACANAFNNSIIPEDTFFPSPESSCGTQSFGLLDPKLSYLLDGILFIYGVILTALFLRVKFSRSADAPAYQQGQNQLYNELNLGRREEYDVLDKRRGRDPEMGGKPQRRKNPQEGLYNELQKDKMAEAYSEIGMKGERRRGKGHDGLYQGLSTATKDTYDALHMQALPPR

SEQ ID NO: 10659 - protein, 822 aa, -Artificial-Sequence; identical to SEQ ID NO: 10658

SEQ ID NO: 10660 - protein, 822 aa, -Artificial-Sequence
MALPVTALLLPLALLLHAARPEFEADIYQTPRYLVIGTGKKITLECSQTMGHDKMYWYQQDPGMELHLIHYSYGVNSTEKGDLSSESTVSRIRTEHFPLTLESARPSHTSQYLCASSEARGLAEFTDTQYFGPGTRLTVLEDLKNVFPPEVAVFEPSEAEISHTQKATLVCLATGFYPDHVELSWWVNGKEVHSGVSTDPQPLKEQPALNDSRYCLSSRLRVSATFWQNPRNHFRCQVQFYGLSENDEWTQDRAKPVTQIVSAEAWGRADCGSQSFGLLDPKLSYLLDGILFIYGVILTALFLRVKFSRSADAPAYQQGQNQLYNELNLGRREEYDVLDKRRGRDPEMGGKPQRRKNPQEGLYNELQKDKMAEAYSEIGMKGERRRGKGHDGLYQGLSTATKDTYDALHMQALPPRRAKRSGSGATNFSLLKQAGDVEENPGPTSMDWIWRILFLVGAATGAHSFEAQTVTQSQPEMSVQEAETVTLSCTYDTSESDYYLFWYKQPPSRQMILVIRQEAYKQQNATENRFSVNFQKAAKSFSLKISDSQLGDAAMYFCAYRSAVNARLMFGDGTQLVVKPNTRIQNPDPAVYQLRDSKSSDKSVCLFTDFDSQTNVSQSKDSDVYITDKTVLDMRSMDFKSNSAVAWSNKSDFACANAFNNSIIPEDTFFPSPESSCGTQSFGLLDPKLSYLLDGILFIYGVILTALFLRVKFSRSADAPAYQQGQNQLYNELNLGRREEYDVLDKRRGRDPEMGGKPQRRKNPQEGLYNELQKDKMAEAYSEIGMKGERRRGKGHDGLYQGLSTATKDTYDALHMQALPPR

SEQ ID NO: 10661 - protein, 726 aa, -Artificial-Sequence
MALPVTALLLPLALLLHAARPEFEADIYQTPRYLVIGTGKKITLECSQTMGHDKMYWYQQDPGMELHLIHYSYGVNSTEKGDLSSESTVSRIRTEHFPLTLESARPSHTSQYLCASSEARGLAEFTDTQYFGPGTRLTVLEDLKNVFPPEVAVFEPSEAEISHTQKATLVCLATGFYPDHVELSWWVNGKEVHSGVSTDPQPLKEQPALNDSRYCLSSRLRVSATFWQNPRNHFRCQVQFYGLSENDEWTQDRAKPVTQIVSAEAWGRADCGSTTPGERSSLPAFYPGTSGSCSGCGSLSLPLLAGLVAADAVASLLIVGAVFLCARPRRSPAQEDGKVYINMPGRGRAKRSGSGATNFSLLKQAGDVEENPGPTSMDWIWRILFLVGAATGAHSFEAQTVTQSQPEMSVQEAETVTLSCTYDTSESDYYLFWYKQPPSRQMILVIRQEAYKQQNATENRFSVNFQKAAKSFSLKISDSQLGDAAMYFCAYRSAVNARLMFGDGTQLVVKPNTRIQNPDPAVYQLRDSKSSDKSVCLFTDFDSQTNVSQSKDSDVYITDKTVLDMRSMDFKSNSAVAWSNKSDFACANAFNNSIIPEDTFFPSPESSCGTTTPGERSSLPAFYPGTSGSCSGCGSLSLPLLAGLVAADAVASLLIVGAVFKRGRKKLLYIFKQPFMRPVQTTQEEDGCSCRFPEEEEGGCELLCARPRRSPAQEDGKVYINMPGRG

SEQ ID NO: 10662 - protein, 725 aa, -Artificial-Sequence
MALPVTALLLPLALLLHAARPEFEADIYQTPRYLVIGTGKKITLECSQTMGHDKMYWYQQDPGMELHLIHYSYGVNSTEKGDLSSESTVSRIRTEHFPLTLESARPSHTSQYLCASSEARGLAEFTDTQYFGPGTRLTVLEDLKNVFPPEVAVFEPSEAEISHTQKATLVCLATGFYPDHVELSWWVNGKEVHSGVSTDPQPLKEQPALNDSRYCLSSRLRVSATFWQNPRNHFRCQVQFYGLSENDEWTQDRAKPVTQIVSAEAWGRADCGSTTPGERSSLPAFYPGTSGSCSGCGSLSLPLLAGLVAADAVASLLIVGAVFLCARPRRSPAQEDGKVYINMPGRGRAKRSGSGATNFSLLKQAGDVEENPGPTSMDWIWRILFLVGAATGAHSFEAQTVTQSQPEMSVQEAETVTLSCTYDTSESDYYLFWYKQPPSRQMILVIRQEAYKQQNATENRFSVNFQKAAKSFSLKISDSQLGDAAMYFCAYRSAVNARLMFGDGTQLVVKPNTRIQNPDPAVYQLRDSKSSDKSVCLFTDFDSQTNVSQSKDSDVYITDKTVLDMRSMDFKSNSAVAWSNKSDFACANAFNNSIIPEDTFFPSPESSCGTTTPGERSSLPAFYPGTSGSCSGCGSLSLPLLAGLVAADAVASLLIVGAVFRSKRSRLLHSDYMNMTPRRPGPTRKHYQPYAPPRDFAAYRSLCARPRRSPAQEDGKVYINMPGRG

SEQ ID NO: 10663 - protein, 720 aa, -Artificial-Sequence
MALPVTALLLPLALLLHAARPEFEADIYQTPRYLVIGTGKKITLECSQTMGHDKMYWYQQDPGMELHLIHYSYGVNSTEKGDLSSESTVSRIRTEHFPLTLESARPSHTSQYLCASSEARGLAEFTDTQYFGPGTRLTVLEDLKNVFPPEVAVFEPSEAEISHTQKATLVCLATGFYPDHVELSWWVNGKEVHSGVSTDPQPLKEQPALNDSRYCLSSRLRVSATFWQNPRNHFRCQVQFYGLSENDEWTQDRAKPVTQIVSAEAWGRADCGSTTPGERSSLPAFYPGTSGSCSGCGSLSLPLLAGLVAADAVASLLIVGAVFLCARPRRSPAQEDGKVYINMPGRGRAKRSGSGATNFSLLKQAGDVEENPGPTSMDWIWRILFLVGAATGAHSFEAQTVTQSQPEMSVQEAETVTLSCTYDTSESDYYLFWYKQPPSRQMILVIRQEAYKQQNATENRFSVNFQKAAKSFSLKISDSQLGDAAMYFCAYRSAVNARLMFGDGTQLVVKPNTRIQNPDPAVYQLRDSKSSDKSVCLFTDFDSQTNVSQSKDSDVYITDKTVLDMRSMDFKSNSAVAWSNKSDFACANAFNNSIIPEDTFFPSPESSCGTTTPGERSSLPAFYPGTSGSCSGCGSLSLPLLAGLVAADAVASLLIVGAVFRDQRLPPDAHKPPGGGSFRTPIQEEQADAHSTLAKILCARPRRSPAQEDGKVYINMPGRG

SEQ ID NO: 10664 - protein, 804 aa, -Artificial-Sequence
MALPVTALLLPLALLLHAARPEFEADIYQTPRYLVIGTGKKITLECSQTMGHDKMYWYQQDPGMELHLIHYSYGVNSTEKGDLSSESTVSRIRTEHFPLTLESARPSHTSQYLCASSEARGLAEFTDTQYFGPGTRLTVLEDLKNVFPPEVAVFEPSEAEISHTQKATLVCLATGFYPDHVELSWWVNGKEVHSGVSTDPQPLKEQPALNDSRYCLSSRLRVSATFWQNPRNHFRCQVQFYGLSENDEWTQDRAKPVTQIVSAEAWGRADCGSTTPGERSSLPAFYPGTSGSCSGCGSLSLPLLAGLVAADAVASLLIVGAVFLCARPRRSPAQEDGKVYINMPGRGRAKRSGSGATNFSLLKQAGDVEENPGPTSMDWIWRILFLVGAATGAHSFEAQTVTQSQPEMSVQEAETVTLSCTYDTSESDYYLFWYKQPPSRQMILVIRQEAYKQQNATENRFSVNFQKAAKSFSLKISDSQLGDAAMYFCAYRSAVNARLMFGDGTQLVVKPNTRIQNPDPAVYQLRDSKSSDKSVCLFTDFDSQTNVSQSKDSDVYITDKTVLDMRSMDFKSNSAVAWSNKSDFACANAFNNSIIPEDTFFPSPESSCGTTTPGERSSLPAFYPGTSGSCSGCGSLSLPLLAGLVAADAVASLLIVGAVFWRRKRKEKQSETSPKEFLTIYEDVKDLKTRRNHEQEQTFPGGGSTIYSMIQSQSSAPTSQEPAYTLYSLIQPSRKSGSRKRNHSPSFNSTIYEVIGKSQPKAQNPARLSRKELENFDVYSLCARPRRSPAQEDGKVYINMPGRG

SEQ ID NO: 10665 - protein, 755 aa, -Artificial-Sequence
MALPVTALLLPLALLLHAARPEFEADIYQTPRYLVIGTGKKITLECSQTMGHDKMYWYQQDPGMELHLIHYSYGVNSTEKGDLSSESTVSRIRTEHFPLTLESARPSHTSQYLCASSEARGLAEFTDTQYFGPGTRLTVLEDLKNVFPPEVAVFEPSEAEISHTQKATLVCLATGFYPDHVELSWWVNGKEVHSGVSTDPQPLKEQPALNDSRYCLSSRLRVSATFWQNPRNHFRCQVQFYGLSENDEWTQDRAKPVTQIVSAEAWGRADCGSLGEPQLCYILDAILFLYGIVLTLLYCKRGRKKLLYIFKQPFMRPVQTTQEEDGCSCRFPEEEEGGCELRLKIQVRKAAITSYEKSDGVYTGLSTRNQETYETLKHEKPPQRAKRSGSGATNFSLLKQAGDVEENPGPTSMDWIWRILFLVGAATGAHSFEAQTVTQSQPEMSVQEAETVTLSCTYDTSESDYYLFWYKQPPSRQMILVIRQEAYKQQNATENRFSVNFQKAAKSFSLKISDSQLGDAAMYFCAYRSAVNARLMFGDGTQLVVKPNTRIQNPDPAVYQLRDSKSSDKSVCLFTDFDSQTNVSQSKDSDVYITDKTVLDMRSMDFKSNSAVAWSNKSDFACANAFNNSIIPEDTFFPSPESSCGTLGEPQLCYILDAILFLYGIVLTLLYCRSKRSRLLHSDYMNMTPRRPGPTRKHYQPYAPPRDFAAYRSRLKIQVRKAAITSYEKSDGVYTGLSTRNQETYETLKHEKPPQ

SEQ ID NO: 10666 - protein, 750 aa, -Artificial-Sequence
MALPVTALLLPLALLLHAARPEFEADIYQTPRYLVIGTGKKITLECSQTMGHDKMYWYQQDPGMELHLIHYSYGVNSTEKGDLSSESTVSRIRTEHFPLTLESARPSHTSQYLCASSEARGLAEFTDTQYFGPGTRLTVLEDLKNVFPPEVAVFEPSEAEISHTQKATLVCLATGFYPDHVELSWWVNGKEVHSGVSTDPQPLKEQPALNDSRYCLSSRLRVSATFWQNPRNHFRCQVQFYGLSENDEWTQDRAKPVTQIVSAEAWGRADCGSLGEPQLCYILDAILFLYGIVLTLLYCKRGRKKLLYIFKQPFMRPVQTTQEEDGCSCRFPEEEEGGCELRLKIQVRKAAITSYEKSDGVYTGLSTRNQETYETLKHEKPPQRAKRSGSGATNFSLLKQAGDVEENPGPTSMDWIWRILFLVGAATGAHSFEAQTVTQSQPEMSVQEAETVTLSCTYDTSESDYYLFWYKQPPSRQMILVIRQEAYKQQNATENRFSVNFQKAAKSFSLKISDSQLGDAAMYFCAYRSAVNARLMFGDGTQLVVKPNTRIQNPDPAVYQLRDSKSSDKSVCLFTDFDSQTNVSQSKDSDVYITDKTVLDMRSMDFKSNSAVAWSNKSDFACANAFNNSIIPEDTFFPSPESSCGTLGEPQLCYILDAILFLYGIVLTLLYCRDQRLPPDAHKPPGGGSFRTPIQEEQADAHSTLAKIRLKIQVRKAAITSYEKSDGVYTGLSTRNQETYETLKHEKPPQ

SEQ ID NO: 10667 - protein, 834 aa, -Artificial-Sequence
MALPVTALLLPLALLLHAARPEFEADIYQTPRYLVIGTGKKITLECSQTMGHDKMYWYQQDPGMELHLIHYSYGVNSTEKGDLSSESTVSRIRTEHFPLTLESARPSHTSQYLCASSEARGLAEFTDTQYFGPGTRLTVLEDLKNVFPPEVAVFEPSEAEISHTQKATLVCLATGFYPDHVELSWWVNGKEVHSGVSTDPQPLKEQPALNDSRYCLSSRLRVSATFWQNPRNHFRCQVQFYGLSENDEWTQDRAKPVTQIVSAEAWGRADCGSLGEPQLCYILDAILFLYGIVLTLLYCKRGRKKLLYIFKQPFMRPVQTTQEEDGCSCRFPEEEEGGCELRLKIQVRKAAITSYEKSDGVYTGLSTRNQETYETLKHEKPPQRAKRSGSGATNFSLLKQAGDVEENPGPTSMDWIWRILFLVGAATGAHSFEAQTVTQSQPEMSVQEAETVTLSCTYDTSESDYYLFWYKQPPSRQMILVIRQEAYKQQNATENRFSVNFQKAAKSFSLKISDSQLGDAAMYFCAYRSAVNARLMFGDGTQLVVKPNTRIQNPDPAVYQLRDSKSSDKSVCLFTDFDSQTNVSQSKDSDVYITDKTVLDMRSMDFKSNSAVAWSNKSDFACANAFNNSIIPEDTFFPSPESSCGTLGEPQLCYILDAILFLYGIVLTLLYCWRRKRKEKQSETSPKEFLTIYEDVKDLKTRRNHEQEQTFPGGGSTIYSMIQSQSSAPTSQEPAYTLYSLIQPSRKSGSRKRNHSPSFNSTIYEVIGKSQPKAQNPARLSRKELENFDVYSRLKIQVRKAAITSYEKSDGVYTGLSTRNQETYETLKHEKPPQ

SEQ ID NO: 10668 - protein, 756 aa, -Artificial-Sequence
MALPVTALLLPLALLLHAARPEFEADIYQTPRYLVIGTGKKITLECSQTMGHDKMYWYQQDPGMELHLIHYSYGVNSTEKGDLSSESTVSRIRTEHFPLTLESARPSHTSQYLCASSEARGLAEFTDTQYFGPGTRLTVLEDLKNVFPPEVAVFEPSEAEISHTQKATLVCLATGFYPDHVELSWWVNGKEVHSGVSTDPQPLKEQPALNDSRYCLSSRLRVSATFWQNPRNHFRCQVQFYGLSENDEWTQDRAKPVTQIVSAEAWGRADCGSLGEPQLCYILDAILFLYGIVLTLLYCKRGRKKLLYIFKQPFMRPVQTTQEEDGCSCRFPEEEEGGCELRLKIQVRKAAITSYEKSDGVYTGLSTRNQETYETLKHEKPPQRAKRSGSGATNFSLLKQAGDVEENPGPTSMDWIWRILFLVGAATGAHSFEAQTVTQSQPEMSVQEAETVTLSCTYDTSESDYYLFWYKQPPSRQMILVIRQEAYKQQNATENRFSVNFQKAAKSFSLKISDSQLGDAAMYFCAYRSAVNARLMFGDGTQLVVKPNTRIQNPDPAVYQLRDSKSSDKSVCLFTDFDSQTNVSQSKDSDVYITDKTVLDMRSMDFKSNSAVAWSNKSDFACANAFNNSIIPEDTFFPSPESSCGTLGEPQLCYILDAILFLYGIVLTLLYCKRGRKKLLYIFKQPFMRPVQTTQEEDGCSCRFPEEEEGGCELRLKIQVRKAAITSYEKSDGVYTGLSTRNQETYETLKHEKPPQ

SEQ ID NO: 10669 - protein, 755 aa, -Artificial-Sequence; identical to SEQ ID NO: 10665

SEQ ID NO: 10670 - protein, 754 aa, -Artificial-Sequence
MALPVTALLLPLALLLHAARPEFEADIYQTPRYLVIGTGKKITLECSQTMGHDKMYWYQQDPGMELHLIHYSYGVNSTEKGDLSSESTVSRIRTEHFPLTLESARPSHTSQYLCASSEARGLAEFTDTQYFGPGTRLTVLEDLKNVFPPEVAVFEPSEAEISHTQKATLVCLATGFYPDHVELSWWVNGKEVHSGVSTDPQPLKEQPALNDSRYCLSSRLRVSATFWQNPRNHFRCQVQFYGLSENDEWTQDRAKPVTQIVSAEAWGRADCGSLGEPQLCYILDAILFLYGIVLTLLYCRSKRSRLLHSDYMNMTPRRPGPTRKHYQPYAPPRDFAAYRSRLKIQVRKAAITSYEKSDGVYTGLSTRNQETYETLKHEKPPQRAKRSGSGATNFSLLKQAGDVEENPGPTSMDWIWRILFLVGAATGAHSFEAQTVTQSQPEMSVQEAETVTLSCTYDTSESDYYLFWYKQPPSRQMILVIRQEAYKQQNATENRFSVNFQKAAKSFSLKISDSQLGDAAMYFCAYRSAVNARLMFGDGTQLVVKPNTRIQNPDPAVYQLRDSKSSDKSVCLFTDFDSQTNVSQSKDSDVYITDKTVLDMRSMDFKSNSAVAWSNKSDFACANAFNNSIIPEDTFFPSPESSCGTLGEPQLCYILDAILFLYGIVLTLLYCRSKRSRLLHSDYMNMTPRRPGPTRKHYQPYAPPRDFAAYRSRLKIQVRKAAITSYEKSDGVYTGLSTRNQETYETLKHEKPPQ

SEQ ID NO: 10671 - protein, 672 aa, -Artificial-Sequence
MALPVTALLLPLALLLHAARPEFEADIYQTPRYLVIGTGKKITLECSQTMGHDKMYWYQQDPGMELHLIHYSYGVNSTEKGDLSSESTVSRIRTEHFPLTLESARPSHTSQYLCASSEARGLAEFTDTQYFGPGTRLTVLEDLKNVFPPEVAVFEPSEAEISHTQKATLVCLATGFYPDHVELSWWVNGKEVHSGVSTDPQPLKEQPALNDSRYCLSSRLRVSATFWQNPRNHFRCQVQFYGLSENDEWTQDRAKPVTQIVSAEAWGRADCGSLGEPQLSYILDAILFLYGIVLTLLYCRLKIQVRKAAITSYEKSDGVYTGLSTRNQETYETLKHEKPPQRAKRSGSGATNFSLLKQAGDVEENPGPTSMDWIWRILFLVGAATGAHSFEAQTVTQSQPEMSVQEAETVTLSCTYDTSESDYYLFWYKQPPSRQMILVIRQEAYKQQNATENRFSVNFQKAAKSFSLKISDSQLGDAAMYFCAYRSAVNARLMFGDGTQLVVKPNTRIQNPDPAVYQLRDSKSSDKSVCLFTDFDSQTNVSQSKDSDVYITDKTVLDMRSMDFKSNSAVAWSNKSDFACANAFNNSIIPEDTFFPSPESSCGTLGEPQLSYILDAILFLYGIVLTLLYCRLKIQVRKAAITSYEKSDGVYTGLSTRNQETYETLKHEKPPQ

SEQ ID NO: 10672 - protein, 708 aa, -Artificial-Sequence
MALPVTALLLPLALLLHAARPEFEADIYQTPRYLVIGTGKKITLECSQTMGHDKMYWYQQDPGMELHLIHYSYGVNSTEKGDLSSESTVSRIRTEHFPLTLESARPSHTSQYLCASSEARGLAEFTDTQYFGPGTRLTVLEDLKNVFPPEVAVFEPSEAEISHTQKATLVCLATGFYPDHVELSWWVNGKEVHSGVSTDPQPLKEQPALNDSRYCLSSRLRVSATFWQNPRNHFRCQVQFYGLSENDEWTQDRAKPVTQIVSAEAWGRADCGSQAQSDCSCSTVSPGVLAGIVMGDLVLTVLIALAVYFLGRLVPRGRGAAEAATRKQRITETESPYQELQGQRSDVYSDLNTQRPYYKRAKRSGSGATNFSLLKQAGDVEENPGPTSMDWIWRILFLVGAATGAHSFEAQTVTQSQPEMSVQEAETVTLSCTYDTSESDYYLFWYKQPPSRQMILVIRQEAYKQQNATENRFSVNFQKAAKSFSLKISDSQLGDAAMYFCAYRSAVNARLMFGDGTQLVVKPNTRIQNPDPAVYQLRDSKSSDKSVCLFTDFDSQTNVSQSKDSDVYITDKTVLDMRSMDFKSNSAVAWSNKSDFACANAFNNSIIPEDTFFPSPESSCGTQAQSDCSSSTVSPGVLAGIVMGDLVLTVLIALAVYFLGRLVPRGRGAAEAATRKQRITETESPYQELQGQRSDVYSDLNTQRPYYK

SEQ ID NO: 10673 - protein, 750 aa, -Artificial-Sequence
MALPVTALLLPLALLLHAARPEFEADIYQTPRYLVIGTGKKITLECSQTMGHDKMYWYQQDPGMELHLIHYSYGVNSTEKGDLSSESTVSRIRTEHFPLTLESARPSHTSQYLCASSEARGLAEFTDTQYFGPGTRLTVLEDLKNVFPPEVAVFEPSEAEISHTQKATLVCLATGFYPDHVELSWWVNGKEVHSGVSTDPQPLKEQPALNDSRYCLSSRLRVSATFWQNPRNHFRCQVQFYGLSENDEWTQDRAKPVTQIVSAEAWGRADCGSQAQSDCSCSTVSPGVLAGIVMGDLVLTVLIALAVYFLGRLVPRGRGAAEAATRKQRITETESPYQELQGQRSDVYSDLNTQRPYYKRAKRSGSGATNFSLLKQAGDVEENPGPTSMDWIWRILFLVGAATGAHSFEAQTVTQSQPEMSVQEAETVTLSCTYDTSESDYYLFWYKQPPSRQMILVIRQEAYKQQNATENRFSVNFQKAAKSFSLKISDSQLGDAAMYFCAYRSAVNARLMFGDGTQLVVKPNTRIQNPDPAVYQLRDSKSSDKSVCLFTDFDSQTNVSQSKDSDVYITDKTVLDMRSMDFKSNSAVAWSNKSDFACANAFNNSIIPEDTFFPSPESSCGTQAQSDCSCSTVSPGVLAGIVMGDLVLTVLIALAVYFLGRLVPRGRGAAEAATRKQRITETESPYQELQGQRSDVYSDLNTQKRGRKKLLYIFKQPFMRPVQTTQEEDGCSCRFPEEEEGGCELRPYYK

SEQ ID NO: 10674 - protein, 749 aa, -Artificial-Sequence
MALPVTALLLPLALLLHAARPEFEADIYQTPRYLVIGTGKKITLECSQTMGHDKMYWYQQDPGMELHLIHYSYGVNSTEKGDLSSESTVSRIRTEHFPLTLESARPSHTSQYLCASSEARGLAEFTDTQYFGPGTRLTVLEDLKNVFPPEVAVFEPSEAEISHTQKATLVCLATGFYPDHVELSWWVNGKEVHSGVSTDPQPLKEQPALNDSRYCLSSRLRVSATFWQNPRNHFRCQVQFYGLSENDEWTQDRAKPVTQIVSAEAWGRADCGSQAQSDCSCSTVSPGVLAGIVMGDLVLTVLIALAVYFLGRLVPRGRGAAEAATRKQRITETESPYQELQGQRSDVYSDLNTQRPYYKRAKRSGSGATNFSLLKQAGDVEENPGPTSMDWIWRILFLVGAATGAHSFEAQTVTQSQPEMSVQEAETVTLSCTYDTSESDYYLFWYKQPPSRQMILVIRQEAYKQQNATENRFSVNFQKAAKSFSLKISDSQLGDAAMYFCAYRSAVNARLMFGDGTQLVVKPNTRIQNPDPAVYQLRDSKSSDKSVCLFTDFDSQTNVSQSKDSDVYITDKTVLDMRSMDFKSNSAVAWSNKSDFACANAFNNSIIPEDTFFPSPESSCGTQAQSDCSCSTVSPGVLAGIVMGDLVLTVLIALAVYFLGRLVPRGRGAAEAATRKQRITETESPYQELQGQRSDVYSDLNTQRSKRSRLLHSDYMNMTPRRPGPTRKHYQPYAPPRDFAAYRSRPYYK

SEQ ID NO: 10675 - protein, 744 aa, -Artificial-Sequence
MALPVTALLLPLALLLHAARPEFEADIYQTPRYLVIGTGKKITLECSQTMGHDKMYWYQQDPGMELHLIHYSYGVNSTEKGDLSSESTVSRIRTEHFPLTLESARPSHTSQYLCASSEARGLAEFTDTQYFGPGTRLTVLEDLKNVFPPEVAVFEPSEAEISHTQKATLVCLATGFYPDHVELSWWVNGKEVHSGVSTDPQPLKEQPALNDSRYCLSSRLRVSATFWQNPRNHFRCQVQFYGLSENDEWTQDRAKPVTQIVSAEAWGRADCGSQAQSDCSCSTVSPGVLAGIVMGDLVLTVLIALAVYFLGRLVPRGRGAAEAATRKQRITETESPYQELQGQRSDVYSDLNTQRPYYKRAKRSGSGATNFSLLKQAGDVEENPGPTSMDWIWRILFLVGAATGAHSFEAQTVTQSQPEMSVQEAETVTLSCTYDTSESDYYLFWYKQPPSRQMILVIRQEAYKQQNATENRFSVNFQKAAKSFSLKISDSQLGDAAMYFCAYRSAVNARLMFGDGTQLVVKPNTRIQNPDPAVYQLRDSKSSDKSVCLFTDFDSQTNVSQSKDSDVYITDKTVLDMRSMDFKSNSAVAWSNKSDFACANAFNNSIIPEDTFFPSPESSCGTQAQSDCSCSTVSPGVLAGIVMGDLVLTVLIALAVYFLGRLVPRGRGAAEAATRKQRITETESPYQELQGQRSDVYSDLNTQRDQRLPPDAHKPPGGGSFRTPIQEEQADAHSTLAKIRPYYK

SEQ ID NO: 10676 - protein, 828 aa, -Artificial-Sequence
MALPVTALLLPLALLLHAARPEFEADIYQTPRYLVIGTGKKITLECSQTMGHDKMYWYQQDPGMELHLIHYSYGVNSTEKGDLSSESTVSRIRTEHFPLTLESARPSHTSQYLCASSEARGLAEFTDTQYFGPGTRLTVLEDLKNVFPPEVAVFEPSEAEISHTQKATLVCLATGFYPDHVELSWWVNGKEVHSGVSTDPQPLKEQPALNDSRYCLSSRLRVSATFWQNPRNHFRCQVQFYGLSENDEWTQDRAKPVTQIVSAEAWGRADCGSQAQSDCSCSTVSPGVLAGIVMGDLVLTVLIALAVYFLGRLVPRGRGAAEAATRKQRITETESPYQELQGQRSDVYSDLNTQRPYYKRAKRSGSGATNFSLLKQAGDVEENPGPTSMDWIWRILFLVGAATGAHSFEAQTVTQSQPEMSVQEAETVTLSCTYDTSESDYYLFWYKQPPSRQMILVIRQEAYKQQNATENRFSVNFQKAAKSFSLKISDSQLGDAAMYFCAYRSAVNARLMFGDGTQLVVKPNTRIQNPDPAVYQLRDSKSSDKSVCLFTDFDSQTNVSQSKDSDVYITDKTVLDMRSMDFKSNSAVAWSNKSDFACANAFNNSIIPEDTFFPSPESSCGTQAQSDCSCSTVSPGVLAGIVMGDLVLTVLIALAVYFLGRLVPRGRGAAEAATRKQRITETESPYQELQGQRSDVYSDLNTQWRRKRKEKQSETSPKEFLTIYEDVKDLKTRRNHEQEQTFPGGGSTIYSMIQSQSSAPTSQEPAYTLYSLIQPSRKSGSRKRNHSPSFNSTIYEVIGKSQPKAQNPARLSRKELENFDVYSRPYYK

SEQ ID NO: 10677 - protein, 920 aa, -Artificial-Sequence
MALPVTALLLPLALLLHAARPEFEADIYQTPRYLVIGTGKKITLECSQTMGHDKMYWYQQDPGMELHLIHYSYGVNSTEKGDLSSESTVSRIRTEHFPLTLESARPSHTSQYLCASSEARGLAEFTDTQYFGPGTRLTVLEDLKNVFPPEVAVFEPSEAEISHTQKATLVCLATGFYPDHVELSWWVNGKEVHSGVSTDPQPLKEQPALNDSRYCLSSRLRVSATFWQNPRNHFRCQVQFYGLSENDEWTQDRAKPVTQIVSAEAWGRADCGSQAQSDCSCSTVSPGVLAGIVMGDLVLTVLIALAVYFLGRLVPRGRGAAEAATRKQRITETESPYQELQGQRSDVYSDLNTQRVKFSRSADAPAYQQGQNQLYNELNLGRREEYDVLDKRRGRDPEMGGKPQRRKNPQEGLYNELQKDKMAEAYSEIGMKGERRRGKGHDGLYQGLSTATKDTYDALHMQALPPRRAKRSGSGATNFSLLKQAGDVEENPGPTSMDWIWRILFLVGAATGAHSFEAQTVTQSQPEMSVQEAETVTLSCTYDTSESDYYLFWYKQPPSRQMILVIRQEAYKQQNATENRFSVNFQKAAKSFSLKISDSQLGDAAMYFCAYRSAVNARLMFGDGTQLVVKPNTRIQNPDPAVYQLRDSKSSDKSVCLFTDFDSQTNVSQSKDSDVYITDKTVLDMRSMDFKSNSAVAWSNKSDFACANAFNNSIIPEDTFFPSPESSCGTTTPGERSSLPAFYPGTSGSCSGCGSLSLPLLAGLVAADAVASLLIVGAVFLCARPRRSPAQEDGKVYINMPGRGSSRRVKFSRSADAPAYQQGQNQLYNELNLGRREEYDVLDKRRGRDPEMGGKPQRRKNPQEGLYNELQKDKMAEAYSEIGMKGERRRGKGHDGLYQGLSTATKDTYDALHMQALPPR

SEQ ID NO: 10678 - protein, 846 aa, -Artificial-Sequence
MALPVTALLLPLALLLHAARPEFEADIYQTPRYLVIGTGKKITLECSQTMGHDKMYWYQQDPGMELHLIHYSYGVNSTEKGDLSSESTVSRIRTEHFPLTLESARPSHTSQYLCASSEARGLAEFTDTQYFGPGTRLTVLEDLKNVFPPEVAVFEPSEAEISHTQKATLVCLATGFYPDHVELSWWVNGKEVHSGVSTDPQPLKEQPALNDSRYCLSSRLRVSATFWQNPRNHFRCQVQFYGLSENDEWTQDRAKPVTQIVSAEAWGRADCGSQAQSDCSCSTVSPGVLAGIVMGDLVLTVLIALAVYFLGRLVPRGRGAAEAATRKQRITETESPYQELQGQRSDVYSDLNTQRVKFSRSADAPAYQQGQNQLYNELNLGRREEYDVLDKRRGRDPEMGGKPQRRKNPQEGLYNELQKDKMAEAYSEIGMKGERRRGKGHDGLYQGLSTATKDTYDALHMQALPPRRAKRSGSGATNFSLLKQAGDVEENPGPTSMDWIWRILFLVGAATGAHSFEAQTVTQSQPEMSVQEAETVTLSCTYDTSESDYYLFWYKQPPSRQMILVIRQEAYKQQNATENRFSVNFQKAAKSFSLKISDSQLGDAAMYFCAYRSAVNARLMFGDGTQLVVKPNTRIQNPDPAVYQLRDSKSSDKSVCLFTDFDSQTNVSQSKDSDVYITDKTVLDMRSMDFKSNSAVAWSNKSDFACANAFNNSIIPEDTFFPSPESSCGTTTPGERSSLPAFYPGTSGSCSGCGSLSLPLLAGLVAADAVASLLIVGAVFKRGRKKLLYIFKQPFMRPVQTTQEEDGCSCRFPEEEEGGCELLCARPRRSPAQEDGKVYINMPGRG

SEQ ID NO: 10679 - protein, 845 aa, -Artificial-Sequence
MALPVTALLLPLALLLHAARPEFEADIYQTPRYLVIGTGKKITLECSQTMGHDKMYWYQQDPGMELHLIHYSYGVNSTEKGDLSSESTVSRIRTEHFPLTLESARPSHTSQYLCASSEARGLAEFTDTQYFGPGTRLTVLEDLKNVFPPEVAVFEPSEAEISHTQKATLVCLATGFYPDHVELSWWVNGKEVHSGVSTDPQPLKEQPALNDSRYCLSSRLRVSATFWQNPRNHFRCQVQFYGLSENDEWTQDRAKPVTQIVSAEAWGRADCGSQAQSDCSCSTVSPGVLAGIVMGDLVLTVLIALAVYFLGRLVPRGRGAAEAATRKQRITETESPYQELQGQRSDVYSDLNTQRVKFSRSADAPAYQQGQNQLYNELNLGRREEYDVLDKRRGRDPEMGGKPQRRKNPQEGLYNELQKDKMAEAYSEIGMKGERRRGKGHDGLYQGLSTATKDTYDALHMQALPPRRAKRSGSGATNFSLLKQAGDVEENPGPTSMDWIWRILFLVGAATGAHSFEAQTVTQSQPEMSVQEAETVTLSCTYDTSESDYYLFWYKQPPSRQMILVIRQEAYKQQNATENRFSVNFQKAAKSFSLKISDSQLGDAAMYFCAYRSAVNARLMFGDGTQLVVKPNTRIQNPDPAVYQLRDSKSSDKSVCLFTDFDSQTNVSQSKDSDVYITDKTVLDMRSMDFKSNSAVAWSNKSDFACANAFNNSIIPEDTFFPSPESSCGTTTPGERSSLPAFYPGTSGSCSGCGSLSLPLLAGLVAADAVASLLIVGAVFRSKRSRLLHSDYMNMTPRRPGPTRKHYQPYAPPRDFAAYRSLCARPRRSPAQEDGKVYINMPGRG

SEQ ID NO: 10680 - protein, 1055 aa, -Artificial-Sequence
MALPVTALLLPLALLLHAARPEFEADIYQTPRYLVIGTGKKITLECSQTMGHDKMYWYQQDPGMELHLIHYSYGVNSTEKGDLSSESTVSRIRTEHFPLTLESARPSHTSQYLCASSEARGLAEFTDTQYFGPGTRLTVLEDLKNVFPPEVAVFEPSEAEISHTQKATLVCLATGFYPDHVELSWWVNGKEVHSGVSTDPQPLKEQPALNDSRYCLSSRLRVSATFWQNPRNHFRCQVQFYGLSENDEWTQDRAKPVTQIVSAEAWGRADCGSQSFGLLDPKLCYLLDGILFIYGVILTALFLRVKFSRSADAPAYQQGQNQLYNELNLGRREEYDVLDKRRGRDPEMGGKPQRRKNPQEGLYNELQKDKMAEAYSEIGMKGERRRGKGHDGLYQGLSTATKDTYDALHMQALPPRRAKRSGSGATNFSLLKQAGDVEENPGPTSMDWIWRILFLVGAATGAHSFEAQTVTQSQPEMSVQEAETVTLSCTYDTSESDYYLFWYKQPPSRQMILVIRQEAYKQQNATENRFSVNFQKAAKSFSLKISDSQLGDAAMYFCAYRSAVNARLMFGDGTQLVVKPNTRIQNPDPAVYQLRDSKSSDKSVCLFTDFDSQTNVSQSKDSDVYITDKTVLDMRSMDFKSNSAVAWSNKSDFACANAFNNSIIPEDTFFPSPESSCGTQSFGLLDPKLCYLLDGILFIYGVILTALFLRVKFSRSADAPAYQQGQNQLYNELNLGRREEYDVLDKRRGRDPEMGGKPQRRKNPQEGLYNELQKDKMAEAYSEIGMKGERRRGKGHDGLYQGLSTATKDTYDALHMQALPPRRAKRSGSGVKQTLNFDLLKLAGDVESNPGPSRGHMTEYKPTVRLATRDDVPRAVRTLAAAFADYPATRHTVDPDRHIERVTELQELFLTRVGLDIGKVWVADDGAAVAVWTTPESVEAGAVFAEIGPRMAELSGSRLAAQQQMEGLLAPHRPKEPAWFLATVGVSPDHQGKGLGSAVVLPGVEAAERAGVPAFLETSAPRNLPFYERLGFTVTADVEVPEGPRTWCMTRKPGA

SEQ ID NO: 10681 - protein, 831 aa, -Artificial-Sequence
MALPVTALLLPLALLLHAARPEFEADIYQTPRYLVIGTGKKITLECSQTMGHDKMYWYQQDPGMELHLIHYSYGVNSTEKGDLSSESTVSRIRTEHFPLTLESARPSHTSQYLCASSEARGLAEFTDTQYFGPGTRLTVLEDLKNVFPPEVAVFEPSEAEISHTQKATLVCLATGFYPDHVELSWWVNGKEVHSGVSTDPQPLKEQPALNDSRYCLSSRLRVSATFWQNPRNHFRCQVQFYGLSENDEWTQDRAKPVTQIVSAEAWGRADCGSQSFGLLDPKLCYLLDGILFIYGVILTALFLRVKFSRSADAPAYQQGQNQLYNELNLGRREEYDVLDKRRGRDPEMGGKPQRRKNPQEGLYNELQKDKMAEAYSEIGMKGERRRGKGHDGLYQGLSTATKDTYDALHMQALPPRRAKRSGSGATNFSLLKQAGDVEENPGPTSMDWIWRILFLVGAATGAHSFEAQTVTQSQPEMSVQEAETVTLSCTYDTSESDYYLFWYKQPPSRQMILVIRQEAYKQQNATENRFSVNFQKAAKSFSLKISDSQLGDAAMYFCAYRSAVNARLMFGDGTQLVVKPNTRASTKGPSVFPLAPSSKSTSGGTAALGCLVKDYFPEPVTVSWNSGALTSGVHTFPAVLQSSGLYSLSSVVTVPSSSLGTQTYICNVNHKPSNTKVDKRVEPKSCGTQSFGLLDPKLSYLLDGILFIYGVILTALFLRVKFSRSADAPAYQQGQNQLYNELNLGRREEYDVLDKRRGRDPEMGGKPQRRKNPQEGLYNELQKDKMAEAYSEIGMKGERRRGKGHDGLYQGLSTATKDTYDALHMQALPPR

SEQ ID NO: 10682 - protein, 831 aa, -Artificial-Sequence; identical to SEQ ID NO: 10681

SEQ ID NO: 10683 - protein, 831 aa, -Artificial-Sequence; identical to SEQ ID NO: 10681

SEQ ID NO: 10684 - protein, 822 aa, -Artificial-Sequence
MALPVTALLLPLALLLHAARPEFEADIYQTPRYLVIGTGKKITLECSQTMGHDKMYWYQQDPGMELHLIHYSYGVNSTEKGDLSSESTVSRIRTEHFPLTLESARPSHTSQYLCASSEARGLAEFTDTQYFGPGTRLTVLEDLKNVFPPEVAVFEPSEAEISHTQKATLVCLATGFYPDHVELSWWVNGKEVHSGVSTDPQPLKEQPALNDSRYCLSSRLRVSATFWQNPRNHFRCQVQFYGLSENDEWTQDRAKPVTQIVSAEAWGRADCGSQSFGLLDPKLCYLLDGILFIYGVILTALFLRVKFSRSADAPAYQQGQNQLYNELNLGRREEYDVLDKRRGRDPEMGGKPQRRKNPQEGLYNELQKDKMAEAYSEIGMKGERRRGKGHDGLYQGLSTATKDTYDALHMQALPPRRAKRSGSGATNFSLLKQAGDVEENPGPTSMDWIWRILFLVGAATGAHSFEAQTVTQSQPEMSVQEAETVTLSCTYDTSESDYYLFWYKQPPSRQMILVIRQEAYKQQNATENRFSVNFQKAAKSFSLKISDSQLGDAAMYFCAYRSAVNARLMFGDGTQLVVKPNTRIQNPDPAVYQLRDSKSSDKSVCLFTDFDSQTNVSQSKDSDVYITDKTVLDMRSMDFKSNSAVAWSNKSDFACANAFNNSIIPEDTFFPSPESSCGTQSFGLLDPKLSYLLDGILFIYGVILTALFLRVKFSRSADAPAYQQGQNQLYNELNLGRREEYDVLDKRRGRDPEMGGKPQRRKNPQEGLYNELQKDKMAEAYSEIGMKGERRRGKGHDGLYQGLSTATKDTYDALHMQALPPR

SEQ ID NO: 10685 - protein, 956 aa, -Artificial-Sequence
MALPVTALLLPLALLLHAARPEFEADIYQTPRYLVIGTGKKITLECSQTMGHDKMYWYQQDPGMELHLIHYSYGVNSTEKGDLSSESTVSRIRTEHFPLTLESARPSHTSQYLCASSEARGLAEFTDTQYFGPGTRLTVLEGQPKANPTVTLFPPSSEELQANKATLVCLISDFYPGAVTVAWKADGSPVKAGVETTKPSKQSNNKYAASSYLSLTPEQWKSHRSYSCQVTHEGSTVEKTVAPTECSGSLGEPQLCYILDAILFLYGIVLTLLYCRLKIQVRKAAITSYEKSDGVYTGLSTRNQETYETLKHEKPPQRAKRSGSGATNFSLLKQAGDVEENPGPTSMDWIWRILFLVGAATGAHSFEAQTVTQSQPEMSVQEAETVTLSCTYDTSESDYYLFWYKQPPSRQMILVIRQEAYKQQNATENRFSVNFQKAAKSFSLKISDSQLGDAAMYFCAYRSAVNARLMFGDGTQLVVKPNTRIQNPDPAVYQLRDSKSSDKSVCLFTDFDSQTNVSQSKDSDVYITDKTVLDMRSMDFKSNSAVAWSNKSDFACANAFNNSIIPEDTFFPSPESSCGTQSFGLLDPKLCYLLDGILFIYGVILTALFLRVKFSRSADAPAYQQGQNQLYNELNLGRREEYDVLDKRRGRDPEMGGKPQRRKNPQEGLYNELQKDKMAEAYSEIGMKGERRRGKGHDGLYQGLSTATKDTYDALHMQALPPRRAKRSGSGVKQTLNFDLLKLAGDVESNPGPSRGHMTEYKPTVRLATRDDVPRAVRTLAAAFADYPATRHTVDPDRHIERVTELQELFLTRVGLDIGKVWVADDGAAVAVWTTPESVEAGAVFAEIGPRMAELSGSRLAAQQQMEGLLAPHRPKEPAWFLATVGVSPDHQGKGLGSAVVLPGVEAAERAGVPAFLETSAPRNLPFYERLGFTVTADVEVPEGPRTWCMTRKPGA

SEQ ID NO: 10686 - protein, 756 aa, -Artificial-Sequence
MALPVTALLLPLALLLHAARPEFEADIYQTPRYLVIGTGKKITLECSQTMGHDKMYWYQQDPGMELHLIHYSYGVNSTEKGDLSSESTVSRIRTEHFPLTLESARPSHTSQYLCASSEARGLAEFTDTQYFGPGTRLTVLEDLKNVFPPEVAVFEPSEAEISHTQKATLVCLATGFYPDHVELSWWVNGKEVHSGVSTDPQPLKEQPALNDSRYCLSSRLRVSATFWQNPRNHFRCQVQFYGLSENDEWTQDRAKPVTQIVSAEAWGRADCGSQSFGLLDPKLCYLLDGILFIYGVILTALFLRVKFSRSADAPAYQQGQNQLYNELNLGRREEYDVLDKRRGRDPEMGGKPQRRKNPQEGLYNELQKDKMAEAYSEIGMKGERRRGKGHDGLYQGLSTATKDTYDALHMQALPPRRAKRSGSGATNFSLLKQAGDVEENPGPTSMDWIWRILFLVGAATGAHSFEAQTVTQSQPEMSVQEAETVTLSCTYDTSESDYYLFWYKQPPSRQMILVIRQEAYKQQNATENRFSVNFQKAAKSFSLKISDSQLGDAAMYFCAYRSAVNARLMFGDGTQLVVKPNTRASTKGPSVFPLAPSSKSTSGGTAALGCLVKDYFPEPVTVSWNSGALTSGVHTFPAVLQSSGLYSLSSVVTVPSSSLGTQTYICNVNHKPSNTKVDKRVEPKSCGTLGEPQLCYILDAILFLYGIVLTLLYCRLKIQVRKAAITSYEKSDGVYTGLSTRNQETYETLKHEKPPQ

SEQ ID NO: 10687 - protein, 756 aa, -Artificial-Sequence; identical to SEQ ID NO: 10686

SEQ ID NO: 10688 - protein, 747 aa, -Artificial-Sequence
MALPVTALLLPLALLLHAARPEFEADIYQTPRYLVIGTGKKITLECSQTMGHDKMYWYQQDPGMELHLIHYSYGVNSTEKGDLSSESTVSRIRTEHFPLTLESARPSHTSQYLCASSEARGLAEFTDTQYFGPGTRLTVLEDLKNVFPPEVAVFEPSEAEISHTQKATLVCLATGFYPDHVELSWWVNGKEVHSGVSTDPQPLKEQPALNDSRYCLSSRLRVSATFWQNPRNHFRCQVQFYGLSENDEWTQDRAKPVTQIVSAEAWGRADCGSQSFGLLDPKLCYLLDGILFIYGVILTALFLRVKFSRSADAPAYQQGQNQLYNELNLGRREEYDVLDKRRGRDPEMGGKPQRRKNPQEGLYNELQKDKMAEAYSEIGMKGERRRGKGHDGLYQGLSTATKDTYDALHMQALPPRRAKRSGSGATNFSLLKQAGDVEENPGPTSMDWIWRILFLVGAATGAHSFEAQTVTQSQPEMSVQEAETVTLSCTYDTSESDYYLFWYKQPPSRQMILVIRQEAYKQQNATENRFSVNFQKAAKSFSLKISDSQLGDAAMYFCAYRSAVNARLMFGDGTQLVVKPNTRIQNPDPAVYQLRDSKSSDKSVCLFTDFDSQTNVSQSKDSDVYITDKTVLDMRSMDFKSNSAVAWSNKSDFACANAFNNSIIPEDTFFPSPESSCGTLGEPQLCYILDAILFLYGIVLTLLYCRLKIQVRKAAITSYEKSDGVYTGLSTRNQETYETLKHEKPPQ

SEQ ID NO: 10689 - protein, 960 aa, -Artificial-Sequence
MALPVTALLLPLALLLHAARPEFEADIYQTPRYLVIGTGKKITLECSQTMGHDKMYWYQQDPGMELHLIHYSYGVNSTEKGDLSSESTVSRIRTEHFPLTLESARPSHTSQYLCASSEARGLAEFTDTQYFGPGTRLTVLEGQPKANPTVTLFPPSSEELQANKATLVCLISDFYPGAVTVAWKADGSPVKAGVETTKPSKQSNNKYAASSYLSLTPEQWKSHRSYSCQVTHEGSTVEKTVAPTECSTTPGERSSLPAFYPGTSGSCSGCGSLSLPLLAGLVAADAVASLLIVGAVFLCARPRRSPAQEDGKVYINMPGRGRAKRSGSGATNFSLLKQAGDVEENPGPTSMDWIWRILFLVGAATGAHSFEAQTVTQSQPEMSVQEAETVTLSCTYDTSESDYYLFWYKQPPSRQMILVIRQEAYKQQNATENRFSVNFQKAAKSFSLKISDSQLGDAAMYFCAYRSAVNARLMFGDGTQLVVKPNTRIQNPDPAVYQLRDSKSSDKSVCLFTDFDSQTNVSQSKDSDVYITDKTVLDMRSMDFKSNSAVAWSNKSDFACANAFNNSIIPEDTFFPSPESSCGTQSFGLLDPKLCYLLDGILFIYGVILTALFLRVKFSRSADAPAYQQGQNQLYNELNLGRREEYDVLDKRRGRDPEMGGKPQRRKNPQEGLYNELQKDKMAEAYSEIGMKGERRRGKGHDGLYQGLSTATKDTYDALHMQALPPRRAKRSGSGVKQTLNFDLLKLAGDVESNPGPSRGHMTEYKPTVRLATRDDVPRAVRTLAAAFADYPATRHTVDPDRHIERVTELQELFLTRVGLDIGKVWVADDGAAVAVWTTPESVEAGAVFAEIGPRMAELSGSRLAAQQQMEGLLAPHRPKEPAWFLATVGVSPDHQGKGLGSAVVLPGVEAAERAGVPAFLETSAPRNLPFYERLGFTVTADVEVPEGPRTWCMTRKPGA

SEQ ID NO: 10690 - protein, 993 aa, -Artificial-Sequence
MALPVTALLLPLALLLHAARPEFEADIYQTPRYLVIGTGKKITLECSQTMGHDKMYWYQQDPGMELHLIHYSYGVNSTEKGDLSSESTVSRIRTEHFPLTLESARPSHTSQYLCASSEARGLAEFTDTQYFGPGTRLTVLEDLKNVFPPEVAVFEPSEAEISHTQKATLVCLATGFYPDHVELSWWVNGKEVHSGVSTDPQPLKEQPALNDSRYCLSSRLRVSATFWQNPRNHFRCQVQFYGLSENDEWTQDRAKPVTQIVSAEAWGRADCGSQSFGLLDPKLCYLLDGILFIYGVILTALFLRVKFSRSADAPAYQQGQNQLYNELNLGRREEYDVLDKRRGRDPEMGGKPQRRKNPQEGLYNELQKDKMAEAYSEIGMKGERRRGKGHDGLYQGLSTATKDTYDALHMQALPPRRAKRSGSGATNFSLLKQAGDVEENPGPTSMDWIWRILFLVGAATGAHSFEAQTVTQSQPEMSVQEAETVTLSCTYDTSESDYYLFWYKQPPSRQMILVIRQEAYKQQNATENRFSVNFQKAAKSFSLKISDSQLGDAAMYFCAYRSAVNARLMFGDGTQLVVKPNTRASTKGPSVFPLAPSSKSTSGGTAALGCLVKDYFPEPVTVSWNSGALTSGVHTFPAVLQSSGLYSLSSVVTVPSSSLGTQTYICNVNHKPSNTKVDKRVEPKSCTTPGERSSLPAFYPGTSGSCSGCGSLSLPLLAGLVAADAVASLLIVGAVFLCARPRRSPAQEDGKVYINMPGRGRAKRSGSGVKQTLNFDLLKLAGDVESNPGPSRGHMTEYKPTVRLATRDDVPRAVRTLAAAFADYPATRHTVDPDRHIERVTELQELFLTRVGLDIGKVWVADDGAAVAVWTTPESVEAGAVFAEIGPRMAELSGSRLAAQQQMEGLLAPHRPKEPAWFLATVGVSPDHQGKGLGSAVVLPGVEAAERAGVPAFLETSAPRNLPFYERLGFTVTADVEVPEGPRTWCMTRKPGA

SEQ ID NO: 10691 - protein, 993 aa, -Artificial-Sequence; identical to SEQ ID NO: 10690

SEQ ID NO: 10692 - protein, 1100 aa, -Artificial-Sequence
MALPVTALLLPLALLLHAARPEFEADIYQTPRYLVIGTGKKITLECSQTMGHDKMYWYQQDPGMELHLIHYSYGVNSTEKGDLSSESTVSRIRTEHFPLTLESARPSHTSQYLCASSEARGLAEFTDTQYFGPGTRLTVLEDLKNVFPPEVAVFEPSEAEISHTQKATLVCLATGFYPDHVELSWWVNGKEVHSGVSTDPQPLKEQPALNDSRYCLSSRLRVSATFWQNPRNHFRCQVQFYGLSENDEWTQDRAKPVTQIVSAEAWGRADCGSTTPGERSSLPAFYPGTSGSCSGCGSLSLPLLAGLVAADAVASLLIVGAVFLCARPRRSPAQEDGKVYINMPGRGSTSRVKFSRSADAPAYQQGQNQLYNELNLGRREEYDVLDKRRGRDPEMGGKPQRRKNPQEGLYNELQKDKMAEAYSEIGMKGERRRGKGHDGLYQGLSTATKDTYDALHMQALPPRRAKRSGSGATNFSLLKQAGDVEENPGPMDWIWRILFLVGAATGAHSFEAQTVTQSQPEMSVQEAETVTLSCTYDTSESDYYLFWYKQPPSRQMILVIRQEAYKQQNATENRFSVNFQKAAKSFSLKISDSQLGDAAMYFCAYRSAVNARLMFGDGTQLVVKPNTRIQNPDPAVYQLRDSKSSDKSVCLFTDFDSQTNVSQSKDSDVYITDKTVLDMRSMDFKSNSAVAWSNKSDFACANAFNNSIIPEDTFFPSPESSCGTQSFGLLDPKLCYLLDGILFIYGVILTALFLRVKFSRSADAPAYQQGQNQLYNELNLGRREEYDVLDKRRGRDPEMGGKPQRRKNPQEGLYNELQKDKMAEAYSEIGMKGERRRGKGHDGLYQGLSTATKDTYDALHMQALPPRRAKRSGSGVKQTLNFDLLKLAGDVESNPGPSRGHMTEYKPTVRLATRDDVPRAVRTLAAAFADYPATRHTVDPDRHIERVTELQELFLTRVGLDIGKVWVADDGAAVAVWTTPESVEAGAVFAEIGPRMAELSGSRLAAQQQMEGLLAPHRPKEPAWFLATVGVSPDHQGKGLGSAVVLPGVEAAERAGVPAFLETSAPRNLPFYERLGFTVTADVEVPEGPRTWCMTRKPGA

SEQ ID NO: 10693 - protein, 757 aa, -Artificial-Sequence
MALPVTALLLPLALLLHAARPAIQTTDQGEVPNGYNVSRSTIEDFPKKREHFSLILDSAKTNQTSVYFCASSSTNTEVFFGKGTRLTVLEDKQLDADVSPKPTIFLPSIAETKLQKAGTYLCLLEKFFPDVIKIHWQEKKSNTILGSQEGNTMKTNDTYMKFSWLTVPEKSLDKEHRCIVRHENNKNGVDQEIIFPPIKTDVITGSQSFGLLDPKLCYLLDGILFIYGVILTALFLRVKFSRSADAPAYQQGQNQLYNELNLGRREEYDVLDKRRGRDPEMGGKPQRRKNPQEGLYNELQKDKMAEAYSEIGMKGERRRGKGHDGLYQGLSTATKDTYDALHMQALPPRRAKRSGSGATNFSLLKQAGDVEENPGPTSMDWIWRILFLVGAATGAHSFEAGHLEQPQISSTKTLSKTARLECVVSGITISATSVYWYRERPGEVIQFLVSISYDGTVRKESGIPSGKFEVDRIPETSTSTLTIHNVEKQDIATYYCALWEAQQELGKKIKVFGPGTKLIITDKQLTRSQPHTKPSVFVMKNGTNVACLVKEFYPKDIRINLVSSKKITEFDPAIVISPSGKYNAVKLGKYEDSNSVTCSVQHDNKTVHSTDFGTQSFGLLDPKLCYLLDGILFIYGVILTALFLRVKFSRSADAPAYQQGQNQLYNELNLGRREEYDVLDKRRGRDPEMGGKPQRRKNPQEGLYNELQKDKMAEAYSEIGMKGERRRGKGHDGLYQGLSTATKDTYDALHMQALPPR

SEQ ID NO: 10694 - protein, 757 aa, -Artificial-Sequence
MALPVTALLLPLALLLHAARPAGHLEQPQISSTKTLSKTARLECVVSGITISATSVYWYRERPGEVIQFLVSISYDGTVRKESGIPSGKFEVDRIPETSTSTLTIHNVEKQDIATYYCALWEAQQELGKKIKVFGPGTKLIITDKQLLEDKQLDADVSPKPTIFLPSIAETKLQKAGTYLCLLEKFFPDVIKIHWQEKKSNTILGSQEGNTMKTNDTYMKFSWLTVPEKSLDKEHRCIVRHENNKNGVDQEIIFPPIKTDVITGSQSFGLLDPKLCYLLDGILFIYGVILTALFLRVKFSRSADAPAYQQGQNQLYNELNLGRREEYDVLDKRRGRDPEMGGKPQRRKNPQEGLYNELQKDKMAEAYSEIGMKGERRRGKGHDGLYQGLSTATKDTYDALHMQALPPRRAKRSGSGATNFSLLKQAGDVEENPGPTSMDWIWRILFLVGAATGAHSFEAIQTTDQGEVPNGYNVSRSTIEDFPKKREHFSLILDSAKTNQTSVYFCASSSTNTEVFFGKGTRLTVTRSQPHTKPSVFVMKNGTNVACLVKEFYPKDIRINLVSSKKITEFDPAIVISPSGKYNAVKLGKYEDSNSVTCSVQHDNKTVHSTDFGTQSFGLLDPKLCYLLDGILFIYGVILTALFLRVKFSRSADAPAYQQGQNQLYNELNLGRREEYDVLDKRRGRDPEMGGKPQRRKNPQEGLYNELQKDKMAEAYSEIGMKGERRRGKGHDGLYQGLSTATKDTYDALHMQALPPR

SEQ ID NO: 10695 - protein, 118 aa, -Artificial-Sequence; identical to SEQ ID NO: 3235

SEQ ID NO: 10696 - protein, 120 aa, -Artificial-Sequence; identical to SEQ ID NO: 3254

SEQ ID NO: 10697 - protein, 120 aa, -Artificial-Sequence; identical to SEQ ID NO: 3255

SEQ ID NO: 10698 - protein, 128 aa, -Artificial-Sequence; identical to SEQ ID NO: 3256

SEQ ID NO: 10699 - protein, 128 aa, -Artificial-Sequence; identical to SEQ ID NO: 3257

SEQ ID NO: 10700 - protein, 118 aa, -Artificial-Sequence
EVQLVESGGGLVQAGGSLRLSCAASGRTFTMGWFRQAPGKEREFVAAISLSPTLAYYADSVKGRFTISRDNAKNTVVLQMNSLKPEDTALYYCAADRKSVMSIRPDYWGQGTQVTVSS

SEQ ID NO: 10701 - protein, 119 aa, -Artificial-Sequence
QVKLEESGGGLVQPGESLRLSCSASGSIFKVFRVFAMSWYRQGPGKQRELVASISSGETTTYAESVKGRFTISRDNAKNTAYLQMDSLKPEDTAVYYCNADHTFTGDFWGQGTQVTVSS

SEQ ID NO: 10702 - protein, 119 aa, -Artificial-Sequence
QVKLEESGGGLVQPGESLRLSCSASGSIFKVFRVFAMSWYRQGPGKQRELVAEISSGETTTYADSVKGRFTISRDNAKNTAYLQMDSLKPEDTAVYYCNADHTFTGDFWGQGTQVTVSS

SEQ ID NO: 10703 - protein, 115 aa, -Artificial-Sequence
EVQLVESGGGLVQAGGSLRLSCAASGSVFSGNVMGWYRQAPGKEREWVAAIASGGSIYYRDSVKGRFTISRDNAKNTVYLQMNSLKPEDTAVYYCNSHPPTLPYWGLGTQVTVSS

SEQ ID NO: 10704 - protein, 119 aa, -Artificial-Sequence
DVQLVESGGGVVQPGKSLRLSCAASGSIFSIHAMGWFRQAPGKEREFVAAITWSGGITYYEDSVKGRFTISRDNSKNTVYLQMNSLRPEDTAIYYCAADRAESSWYDYWGQGTLVTVSS

SEQ ID NO: 10705 - protein, 119 aa, -Artificial-Sequence
EVQLLESGGGLVQPGGSLRLSCAASGSIASIHAMGWFRQAPGKEREFVAVITWSGGITYYADSVKGRFTISRDNSKNTVYLQMNSLRPEDTALYYCAGDKHQSSWYDYWGQGTLVTVSS

SEQ ID NO: 10706 - protein, 119 aa, -Artificial-Sequence
EVQLVESGGGLVQAGGSLRLSCAASGSIASIHAMGWFRQAPGKEREFVAVITWSGGITYYADSVKGRFTISRDNAKNTVYLQMNSLKPEDTAIYYCAGDKHQSSWYDYWGQGTQVTVSS

SEQ ID NO: 10707 - protein, 118 aa, -Artificial-Sequence
QLQLQESGPGLVKPSETLSLTCTVSGGSIDSRIYYWGWIRQPPGKGLEWIGHIYYSGATYYNPSLKSRVTISVDTSRNQFSLKLSSVTAADTAVYYCTRDDSSNWRSRGQGTLVTVSS

SEQ ID NO: 10708 - protein, 113 aa, -Artificial-Sequence
EVQLLESGGGLVQPGGSLRLSCAASGFSFSGYALSWVRQAPGKGLEWVSSIGENDGTTDYADAVKGRFTISRDNSKNTLYLQMNSLRVEDTAVYYCVKDGVHWGQGTLVTVSS

SEQ ID NO: 10709 - protein, 113 aa, -Artificial-Sequence
EVQLLESGGGLVQPGGSLRLSCAASGFSFSSYALSWVRQAPGKGLEWVSSIGENDGTTDYADAVKGRFTISRDNSKNTLYLQMNSLRVEDTAVYYCVKDGIHWGQGTLVTVSS

SEQ ID NO: 10710 - protein, 113 aa, -Artificial-Sequence
EVQLLESGGGLVQPGGSLRLSCAASGFSFSGYALSWVRQAPGKGLEWVSSIGENDGTTDYADAVKGRFTISRDNSKNTLYLQMNSLRVEDTAVYYCVKDGIHWGQGTLVTVSS

SEQ ID NO: 10711 - protein, 127 aa, -Artificial-Sequence
EVQLVESGGGVVQPGRSLRLSCAASGFSFSGYGMHWVRQAPGKGLEWVAYISYDGSNKYYADSVKGRFTISRDNSKNTLYLQMNSLRAEDTAVYYCAKDPAWGLRLGESSSYDFDYWGQGTMVTVSS

SEQ ID NO: 10712 - protein, 123 aa, -Artificial-Sequence
EVQLVESGGGVVQPGRSLRLSCAASGFPLISYGMHWVRQAPGKGLEWVAFMTYDGSNRYYADSVKGRFTISRDNSKNTLYLQMNSLRDEDTALYYCARDRIVGGRVPDSFDYWGQGTMVTVSS

SEQ ID NO: 10713 - protein, 126 aa, -Artificial-Sequence
QVQLQESGAGLLKPSETLSLTCAVYGGSFSAYNWNWIRQPPGKGLEWIGEINHRGDTAYNPSLKSRVTISVDTSKNQFSLNLTSVTAADTAVYYCAARGYSYGWPPGYISDAFDIWGQGTQVTVSS

SEQ ID NO: 10714 - protein, 4 aa, -Artificial-Sequence
FSMG

SEQ ID NO: 10715 - protein, 5 aa, -Artificial-Sequence
SLFMG

SEQ ID NO: 10716 - protein, 5 aa, -Artificial-Sequence
SLFMG

SEQ ID NO: 10717 - protein, 10 aa, -Artificial-Sequence
GFASDDYIIG

SEQ ID NO: 10718 - protein, 10 aa, -Artificial-Sequence
GFASDYYIIG

SEQ ID NO: 10719 - protein, 4 aa, -Artificial-Sequence
FTMG

SEQ ID NO: 10720 - protein, 8 aa, -Artificial-Sequence
VFRVFAMS

SEQ ID NO: 10721 - protein, 8 aa, -Artificial-Sequence
VFRVFAMS

SEQ ID NO: 10722 - protein, 8 aa, -Artificial-Sequence
GSVFSGNV

SEQ ID NO: 10723 - protein, 7 aa, -Artificial-Sequence
GSIFSIH

SEQ ID NO: 10724 - protein, 7 aa, -Artificial-Sequence
GSIASIH

SEQ ID NO: 10725 - protein, 7 aa, -Artificial-Sequence
GSIASIH

SEQ ID NO: 10726 - protein, 5 aa, -Artificial-Sequence
GGSID

SEQ ID NO: 10727 - protein, 8 aa, -Artificial-Sequence
GFSFSGYA

SEQ ID NO: 10728 - protein, 8 aa, -Artificial-Sequence
GFSFSSYA

SEQ ID NO: 10729 - protein, 8 aa, -Artificial-Sequence
GFSFSGYA

SEQ ID NO: 10730 - protein, 8 aa, -Artificial-Sequence
GFSFSGYG

SEQ ID NO: 10731 - protein, 8 aa, -Artificial-Sequence
GFPLISYG

SEQ ID NO: 10732 - protein, 7 aa, -Artificial-Sequence
GGSFSAY

SEQ ID NO: 10733 - protein, 17 aa, -Artificial-Sequence
AITYSGGSPYYASSVRG

SEQ ID NO: 10734 - protein, 17 aa, -Artificial-Sequence
AISRYSLYTYYADSVKG

SEQ ID NO: 10735 - protein, 17 aa, -Artificial-Sequence
AISRYSLYTYYADSVKG

SEQ ID NO: 10736 - protein, 18 aa, -Artificial-Sequence
CISSKYANTVYTDSVKGR

SEQ ID NO: 10737 - protein, 18 aa, -Artificial-Sequence
CISSRYANTNYADSVKGR

SEQ ID NO: 10738 - protein, 7 aa, -Artificial-Sequence
YYADSVK

SEQ ID NO: 10739 - protein, 16 aa, -Artificial-Sequence
EISSGETTTYAESVKG

SEQ ID NO: 10740 - protein, 16 aa, -Artificial-Sequence
EISSGETTTYADSVKG

SEQ ID NO: 10741 - protein, 7 aa, -Artificial-Sequence
IASGGSI

SEQ ID NO: 10742 - protein, 9 aa, -Artificial-Sequence
ITWSGGITY

SEQ ID NO: 10743 - protein, 9 aa, -Artificial-Sequence
ITWSGGITY

SEQ ID NO: 10744 - protein, 9 aa, -Artificial-Sequence
ITWSGGITY

SEQ ID NO: 10745 - protein, 7 aa, -Artificial-Sequence
IYYSGAT

SEQ ID NO: 10746 - protein, 8 aa, -Artificial-Sequence
IGENDGTT

SEQ ID NO: 10747 - protein, 8 aa, -Artificial-Sequence
IGENDGTT

SEQ ID NO: 10748 - protein, 8 aa, -Artificial-Sequence
IGENDGTT

SEQ ID NO: 10749 - protein, 8 aa, -Artificial-Sequence
ISYDGSNK

SEQ ID NO: 10750 - protein, 8 aa, -Artificial-Sequence
MTYDGSNR

SEQ ID NO: 10751 - protein, 8 aa, -Artificial-Sequence
INHRGDTA

SEQ ID NO: 10752 - protein, 12 aa, -Artificial-Sequence
NPTYGSDWNAEN

SEQ ID NO: 10753 - protein, 11 aa, -Artificial-Sequence
KLEYTSNDYDS

SEQ ID NO: 10754 - protein, 11 aa, -Artificial-Sequence
KLEYTSNDYDS

SEQ ID NO: 10755 - protein, 20 aa, -Artificial-Sequence
MDSRRVTCPEISTMHRNFDS

SEQ ID NO: 10756 - protein, 20 aa, -Artificial-Sequence
ADTRRYTCPDIATMHRNFDS

SEQ ID NO: 10757 - protein, 13 aa, -Artificial-Sequence
ADRKSVMSIRPDY

SEQ ID NO: 10758 - protein, 8 aa, -Artificial-Sequence
DHTFTGDF

SEQ ID NO: 10759 - protein, 8 aa, -Artificial-Sequence
DHTFTGDF

SEQ ID NO: 10760 - protein, 9 aa, -Artificial-Sequence
NSHPPTLPY

SEQ ID NO: 10761 - protein, 9 aa, -Artificial-Sequence
DRAESSWYD

SEQ ID NO: 10762 - protein, 11 aa, -Artificial-Sequence
GDKHQSSWYDY

SEQ ID NO: 10763 - protein, 11 aa, -Artificial-Sequence
GDKHQSSWYDY

SEQ ID NO: 10764 - protein, 6 aa, -Artificial-Sequence
RDDSSN

SEQ ID NO: 10765 - protein, 7 aa, -Artificial-Sequence
VKDGVHW

SEQ ID NO: 10766 - protein, 7 aa, -Artificial-Sequence
VKDGIHW

SEQ ID NO: 10767 - protein, 7 aa, -Artificial-Sequence
VKDGIHW

SEQ ID NO: 10768 - protein, 20 aa, -Artificial-Sequence
AKDPAWGLRLGESSSYDFDY

SEQ ID NO: 10769 - protein, 15 aa, -Artificial-Sequence
RDRIVGGRVPDSFDY

SEQ ID NO: 10770 - protein, 18 aa, -Artificial-Sequence
RGYSYGWPPGYISDAFDI

SEQ ID NO: 10771 - protein, 168 aa, -Artificial-Sequence
MGSWFEFYDRLNAIDARLWALGGSEAELAAFEKEIAAFESELQAYKGKGNPEVENLRVHAAAIREWLQAYRHNGGGGSGGGGSGMGSWLEFYHRLNAIDSRLWALGGSEAELAAFEKEIAAFESELQAYKGKGNPEVESLRDHAAHIREWLQAYRHNGGGGSGGGGSG

SEQ ID NO: 10772 - protein, 73 aa, -Artificial-Sequence
MGSWSEFWVRLGAIRERLDALGGSEAELAAFEKEIAAFESELQAYKGKGNPEVEKLRYTAATIRRFLQAYRHN

SEQ ID NO: 10773 - protein, 73 aa, -Artificial-Sequence
MGSWDEFGRRLYAIEWRLYALGGSEAELAAFEKEIAAFESELQAYKGKGNPEVEKLREIAAVIRSNLQAYRHN

SEQ ID NO: 10774 - protein, 474 aa, -Artificial-Sequence
MALPVTALLLPLALLLHAARPACDEGGGGSMGSWSEFWVRLGAIRERLDALGGSEAELAAFEKEIAAFESELQAYKGKGNPEVEKLRYTAATIRRFLQAYRHNGTGGGGSGGGGSGGGGSGLEKCFQTENPLECQDKGEEELQKYIQESQALAKRSCGLFQKLGEYYLQNAFLVAYTKKAPQLTSSELMAITRKMAATAATCCQLSEDKLLACGEGAADIIIGHLCIRHEMTPVNPGVGQCCTSSYANRRPCFSSLVVDETYVPPAFSDDKFIFHKDLCQAQGVALQTMKQEFLINLVKQKPQITEEQLEAVIADFSGLLEKCCQGQEQEVCFAEEGQKLISKTRAALGVGGGGSGGGGSGGGGSGPMGSWDEFGRRLYAIEWRLYALGGSEAELAAFEKEIAAFESELQAYKGKGNPEVEKLREIAAVIRSNLQAYRHNGSGGGGSGGGGSGGGGSHHHHHHHHHHTRPRLCL

SEQ ID NO: 10775 - protein, 73 aa, -Artificial-Sequence; identical to SEQ ID NO: 9618

SEQ ID NO: 10776 - protein, 73 aa, -Artificial-Sequence
MGSWFEFNHRLWAIFERLMALGGSEAELAAFEKEIAAFESELQAYKGKGNPEVEYLRAMAAVIRYHLQAYRHN

SEQ ID NO: 10777 - protein, 73 aa, -Artificial-Sequence
MGSWVEFYNRLWAIDHRLHALGGSEAELAAFEKEIAAFESELQAYKGKGNPEVEVLRYHAASIRVTLQAYRHN

SEQ ID NO: 10778 - protein, 73 aa, -Artificial-Sequence
MGSWSEFYDRLHAIHHRLYALGGSEAELAAFEKEIAAFESELQAYKGKGNPEVEALRDTAAFIRTRLQAYRHN

SEQ ID NO: 10779 - protein, 276 aa, -Artificial-Sequence
EPHSLRYNLTVLSWDGSVQSGFLTEVHLDGQPFLRCDRQKCRAKPQGQWAEDVLGNKTWDRETRDLTGNGKDLRMTLAHIKDQKEGLHSLQEIRVCEIHEDNSTRSSQHFYYDGELFLSQNLETKEWTMPQSSRAQTLAMNVRNFLKEDAMKTKTHYHAMHADCLQELRRYLKSGVVLRRTVPPMVNVTRSEASEGNITVTCRASGFYPWNITLSWRQDGVSLSHDTQQWGDVLPDGNGTYQTWVATRICQGEEQRFTCYMEHSGNHSTHPVPSGK

SEQ ID NO: 10780 - protein, 189 aa, -Artificial-Sequence
AAEPHSLSYDITVIPKFRPGPRWCAVQGQVDEKTFLHYDCGNKTVTPVSPLGKKLNVTTAWKAQNPVLREVVDILTEQLRDIQLENYTPKEPLTLQARMSCEQKAEGHSSGSWQFSFDGQIFLLFDSEKRMWTTVHPGARKMKEKWENDKVVAMSFHYFSMGDCIGWLEDFLMGMDSTLEPSAGAPPMV

SEQ ID NO: 10781 - protein, 115 aa, -Artificial-Sequence
KNQVEQSPQSLIILEGKNCTLQCNYTVSPFSNLRWYKQDTGRGPVSLTIMTFSENTKSNGRYTATLDADTKQSSLHITASQLSDSASYICVVSDRGSTLGRLYFGRGTQLTVWPD

SEQ ID NO: 10782 - protein, 111 aa, -Artificial-Sequence
DIYQTPRYLVIGTGKKITLECSQTMGHDKMYWYQQDPGMELHLIHYSYGVNSTEKGDLSSESTVSRIRTEHFPLTLESARPSHTSQYLCASSENIGTAYEQYFGPGTRLTV

SEQ ID NO: 10783 - protein, 119 aa, -Artificial-Sequence; identical to SEQ ID NO: 9614

SEQ ID NO: 10784 - protein, 117 aa, -Artificial-Sequence; identical to SEQ ID NO: 9613

SEQ ID NO: 10785 - protein, 134 aa, -Artificial-Sequence
VLHLVPINATSKDDSDVTEVMWQPALRRGRGLQAQGYGVRIQDAGVYLLYSQVLFQDVTFTMGQVVSREGQGRQETLFRCIRSMPSHPDRAYNSCYSAGVFHLHQGDILSVIIPRARAKLNLSPHGTFLGFVKL

SEQ ID NO: 10786 - protein, 134 aa, -Artificial-Sequence; identical to SEQ ID NO: 10785

SEQ ID NO: 10787 - protein, 172 aa, -Artificial-Sequence
GLLDLRQGMFAQLVAQNVLLIDGPLSWYSDPGLAGVSLTGGLSYKEDTKELVVAKAGVYYVFFQLELRRVVAGEGSGSVSLALHLQPLRSAAGAAALALTVDLPPASSEARNSAFGFQGRLLHLSAGQRLGVHLHTEARARHAWQLTQGATVLGLFRVTPEIPAGLPSPRSE

SEQ ID NO: 10788 - protein, 221 aa, -Artificial-Sequence
EWVKFAKPCREGEDNSKRNPIAKITSDYQATQKITYRISGVGIDQPPFGIFVVDKNTGDINITAIVDREETPSFLITCRALNAQGLDVEKPLILTVKILDINDNPPVFSQQIFMGEIEENSASNSLVMILNATDADEPNHLNSKIAFKIVSQEPAGTPMFLLSRNTGEVRTLTNSLDREQASSYRLVVSGADKDGEGLSTQCECNIKVKDVNDNFPMFRDS

SEQ ID NO: 10789 - protein, 450 aa, -Artificial-Sequence
EWVKFAKPCREGEDNSKRNPIAKITSDYQATQKITYRISGVGIDQPPFGIFVVDKNTGDINITAIVDREETPSFLITCRALNAQGLDVEKPLILTVKILDINDNPPVFSQQIFMGEIEENSASNSLVMILNATDADEPNHLNSKIAFKIVSQEPAGTPMFLLSRNTGEVRTLTNSLDREQASSYRLVVSGADKDGEGLSTQCECNIKVKDVNDNFPMFRDSQYSARIEENILSSELLRFQVTDLDEEYTDNWLAVYFFTSGNEGNWFEIQTDPRTNEGILKVVKALDYEQLQSVKLSIAVKNKAEFHQSVISRYRVQSTPVTIQVINVREGIAFRPASKTFTVQKGISSKKLVDYILGTYQAIDEDTNKAASNVKYVMGRNDGGYLMIDSKTAEIKFVKNMNRDSTFIVNKTITAEVLAIDEYTGKTSTGTVYVRVPDFNDNCPTAVLEK

SEQ ID NO: 10790 - protein, 231 aa, -Artificial-Sequence
DSQYSARIEENILSSELLRFQVTDLDEEYTDNWLAVYFFTSGNEGNWFEIQTDPRTNEGILKVVKALDYEQLQSVKLSIAVKNKAEFHQSVISRYRVQSTPVTIQVINVREGIAFRPASKTFTVQKGISSKKLVDYILGTYQAIDEDTNKAASNVKYVMGRNDGGYLMIDSKTAEIKFVKNMNRDSTFIVNKTITAEVLAIDEYTGKTSTGTVYVRVPDFNDNCPTAVLEK

SEQ ID NO: 10791 - protein, 261 aa, -Artificial-Sequence
DSQYSARIEENILSSELLRFQVTDLDEEYTDNWLAVYFFTSGNEGNWFEIQTDPRTNEGILKVVKALDYEQLQSVKLSIAVKNKAEFHQSVISRYRVQSTPVTIQVINVREGIAFRPASKTFTVQKGISSKKLVDYILGTYQAIDEDTNKAASNVKYVMGRNDGGYLMIDSKTAEIKFVKNMNRDSTFIVNKTITAEVLAIDEYTGKTSTGTVYVRVPDFNDNCPTAVLEKDAVCSSSPSVVVSARTLNNRYTGPYTFALE

SEQ ID NO: 10792 - protein, 17 aa, -Artificial-Sequence
INIYNAEPANPSEKNSP

SEQ ID NO: 10793 - protein, 23 aa, -Artificial-Sequence
YINIYNAEPANPSEKNSPTQYAY

SEQ ID NO: 10794 - protein, 24 aa, -Artificial-Sequence
YINIYNAEPANPSEKNSPSTQYAY

SEQ ID NO: 10795 - protein, 142 aa, -Artificial-Sequence
YINIYNAEPANPSEKNSPSTQYAYGSGSSYINIYNAEPANPSEKNSPSTQYAYGSGGSYINIYNAEPANPSEKNSPSTQYAYGSGSSSYINIYNAEPANPSEKNSPSTQYAYGSGSGSYINIYNAEPANPSEKNSPSTQYAY

SEQ ID NO: 10796 - protein, 28 aa, -Artificial-Sequence
YINIYNAEPANPSEKNSPSTQYAYGGGS

SEQ ID NO: 10797 - protein, 59 aa, -Artificial-Sequence
YINIYNAEPANPSEKNSPSTQYAYGGSGGSYINIYNAEPANPSEKNSPSTQYAYSGSGS

SEQ ID NO: 10798 - protein, 52 aa, -Artificial-Sequence
YINIYNAEPANPSEKNSPSTQYAYGGGSYINIYNAEPANPSEKNSPSTQYAY

SEQ ID NO: 10799 - protein, 27 aa, -Artificial-Sequence
SGSGCPYSNPSLCSGSGGCPYSNPSLC

SEQ ID NO: 10800 - protein, 141 aa, -Artificial-Sequence
QDKLTQWPKWLEGGGGSELPTQGTFSNVSTNVSGGGGQDKLTQWPKWLEGGGGSELPTQGTFSNVSTNVSKIEVMYPPPYLDNEKSNGTIIHVKGKHLCPSPLFPGPSKPFWVLVVVGGVLACYSLLVTVAFIIFWVRSKR

SEQ ID NO: 10801 - protein, 43 aa, -Artificial-Sequence
YINIYNAEPANPSEKNSPSTQYAYGGGSQLGPYELWELSHGSG

SEQ ID NO: 10802 - protein, 32 aa, -Artificial-Sequence
GSGSCQFDLSTRRLKCGSGSCQFDLSTRRLKC

SEQ ID NO: 10803 - protein, 32 aa, -Artificial-Sequence
CQFDLSTRRLKCGGGSCQFDLSTRRLKCGGGS

SEQ ID NO: 10804 - protein, 13 aa, -Artificial-Sequence
SCQFDLSTRRLKC

SEQ ID NO: 10805 - protein, 32 aa, -Artificial-Sequence
CQYNLSSRALKCGGGSCQYNLSSRALKCGGGS

SEQ ID NO: 10806 - protein, 13 aa, -Artificial-Sequence
SCQYNLSSRALKC

SEQ ID NO: 10807 - protein, 17 aa, -Artificial-Sequence
GFLLIQAWPENRTDLHA

SEQ ID NO: 10808 - protein, 15 aa, -Artificial-Sequence
IYPPLLRTSQAMGSG

SEQ ID NO: 10809 - protein, 15 aa, -Artificial-Sequence
GCPKWDAARCSGGGS

SEQ ID NO: 10810 - protein, 13 aa, -Artificial-Sequence
GCGPYTWNSCSGG

SEQ ID NO: 10811 - protein, 29 aa, -Artificial-Sequence
SYPPLLRTSQAMSGGGSYPPLLRTSQAMS

SEQ ID NO: 10812 - protein, 13 aa, -Artificial-Sequence
SYPPLLRTSQAMS

SEQ ID NO: 10813 - protein, 15 aa, -Artificial-Sequence
QLGPYELWELSHGSG

SEQ ID NO: 10814 - protein, 53 aa, -Artificial-Sequence
QLGPYELWELSHGSGSGSGSQLGPYELWELSHSGGGSGQLGPYELWELSHGSS

SEQ ID NO: 10815 - protein, 237 aa, -Artificial-Sequence
QAVVTQEPSLTVSPGGTVTLTCGSSTGAVTTSNYASWVQEKPDHLFRGLIGGTNNRAPGVPARFSGSLLGGKAALTISGAQPEDEAIYFCVLWYSDHWVFGGGTKLTVDGGGGSGGGGSGGGGSQVQLQQSGPGLVKPSETLSITCTVSGFLLTDYGVNWVRQPPGKGLEWLGVIWGDGITDYNPSLKSRLTVSKDTSKNQVSLKMSSLTDADTARYYCVTGLFDYWGQGTTLTVSS

SEQ ID NO: 10816 - DNA, 429 bp, Artificial Sequence; identical to SEQ ID NO: 1096
  Synthetic Polynucleotide

SEQ ID NO: 10817 - DNA, 1785 bp, Artificial Sequence
  Synthetic Polynucleotide
atggccttaccagtgaccgccttgctcctgccgctggccttgctgctccacgccgccaggccggacatccagatgacacagagccctagcagcctgtctgccagcgtgggagacagagtgaccatcacatgcaaggccagcgaccacatcaacaactggctggcctggtatcagcagaagcctggacaggcccctaagctgctgatctacggcgctaccacactggaaacaggcgtgcccagcagattttctggcagcggctctggcaccgactacaccctgacaatatccagcctccagcctgaggacttcgccacctactactgtcagcagagctggaacaccccttggacattcggccagggcaccaagctggaaatcaagagaggcggaggcggaagtggaggcggaggatctggcggcggaggctctcaagttcagcttcaacagcctggcgctgagctggtcaaacctggcgcttctgtgaagatgagctgcaaagccagcggctacgccttcagcagctactggatcaactggatgaagcagaaacccggccagggactcgaatggatcggccaaatctatcccggcgacggcgacaccaactacaacggcaagttcaagggcagagccacactgaccgccgatacctctagcagcacagcctacatgcagctgagcagcctgaccagcgaagatagcgccgtgtacttctgtgcccggtccatcacaacagtcgtgggctgcgctatggactattggggccagggaacaagcgtgaccgtgtctagtacgcgtcaagtggtggacacaacaaaagccgtcatcaccctgcaaccaccttgggtttcagtctttcaagaagagacagttaccctgcactgtgaagtcctgcacttgcccggaagcagctccacacagtggttcctcaacggcacagctacccagacaagcaccccttcctaccggatcacatctgcctccgtgaacgattccggcgagtataggtgtcagaggggcctgtctggccgcagcgatcctatccagcttgagattcatcgtggatggttgctcctccaagtgtcctccagggtgttcaccgaaggcgaacctctggcactgaggtgccatgcttggaaagataagctcgtctacaatgtcctctactaccgcaatggcaaggcttttaagttttttcattggaactctaatctcacgatcctgaaaacgaacatctcccacaatgggacataccactgctctggcatgggaaaacatcggtacacctctgccggcatctctgtcacagtcaaagaactgttccctgcaccagtcctgaacgcttccgtgacctctccactgcttgagggaaatctggtcaccctgtcctgcgaaactaagttgctgcttcagaggcccggactccagctctacttttcattctatatgggctctaagaccctgagaggccggaacaccagcagcgaatatcagattctgacagctcggcgcgaggactccgggctctattggtgtgaagctgctacagaggacggaaacgtgctgaaacggtcccctgaactggaaattacccaaggactggctgtgcctacaatctctagcttctttccgcctggataccaagtctccttctgtcttgtgatggtcctcctgtttgctgtggacacaggactgtacttttccgtgaaaacgaacatccgcagctccacacgcgattggaaagatcacaagtttaaatggcgcaaagatccccaggacaag

SEQ ID NO: 10818 - DNA, 2271 bp, Artificial Sequence
  Synthetic Polynucleotide
atggccttaccagtgaccgccttgctcctgccgctggccttgctgctccacgccgccaggccggacatccagatgacacagagccctagcagcctgtctgccagcgtgggagacagagtgaccatcacatgcaaggccagcgaccacatcaacaactggctggcctggtatcagcagaagcctggacaggcccctaagctgctgatctacggcgctaccacactggaaacaggcgtgcccagcagattttctggcagcggctctggcaccgactacaccctgacaatatccagcctccagcctgaggacttcgccacctactactgtcagcagagctggaacaccccttggacattcggccagggcaccaagctggaaatcaagagaggcggaggcggaagtggaggcggaggatctggcggcggaggctctcaagttcagcttcaacagcctggcgctgagctggtcaaacctggcgcttctgtgaagatgagctgcaaagccagcggctacgccttcagcagctactggatcaactggatgaagcagaaacccggccagggactcgaatggatcggccaaatctatcccggcgacggcgacaccaactacaacggcaagttcaagggcagagccacactgaccgccgatacctctagcagcacagcctacatgcagctgagcagcctgaccagcgaagatagcgccgtgtacttctgtgcccggtccatcacaacagtcgtgggctgcgctatggactattggggccagggaacaagcgtgaccgtgtctagtacgcgtcaagtggtggacacaacaaaagccgtcatcaccctgcaaccaccttgggtttcagtctttcaagaagagacagttaccctgcactgtgaagtcctgcacttgcccggaagcagctccacacagtggttcctcaacggcacagctacccagacaagcaccccttcctaccggatcacatctgcctccgtgaacgattccggcgagtataggtgtcagaggggcctgtctggccgcagcgatcctatccagcttgagattcatcgtggatggttgctcctccaagtgtcctccagggtgttcaccgaaggcgaacctctggcactgaggtgccatgcttggaaagataagctcgtctacaatgtcctctactaccgcaatggcaaggcttttaagttttttcattggaactctaatctcacgatcctgaaaacgaacatctcccacaatgggacataccactgctctggcatgggaaaacatcggtacacctctgccggcatctctgtcacagtcaaagaactgttccctgcaccagtcctgaacgcttccgtgacctctccactgcttgagggaaatctggtcaccctgtcctgcgaaactaagttgctgcttcagaggcccggactccagctctacttttcattctatatgggctctaagaccctgagaggccggaacaccagcagcgaatatcagattctgacagctcggcgcgaggactccgggctctattggtgtgaagctgctacagaggacggaaacgtgctgaaacggtcccctgaactggaagcgaagcccaccacgacgccagcgccgcgaccaccaacaccggcgcccaccatcgcgtcgcagcccctgtccctgcgcccagaggcgtgccggccagcggcggggggcgcagtgcacacgagggggctggacttcgcctgtgacatctacatctgggcgcccttggccgggacttgtggggtccttctcctgtcactggttatcaccctttactgcaaacggggcagaaagaaactcctgtatatattcaaacaaccatttatgagaccagtacaaactactcaagaggaagatggctgtagctgccgatttccagaagaagaagaaggaggatgtgaactgagagtgaagttcagcaggagcgcagacgcccccgcgtaccagcagggccagaaccagctctataacgagctgaatctaggacgaagagaggagtacgatgttttggacaagagacgtggccgggaccctgagatggggggaaagccgagaaggaagaaccctcaggaaggcctgtacaatgaactgcagaaagataagatggcggaggcctacagtgagattgggatgaaaggcgagcgccggaggggcaaggggcacgatggcctttaccagggtctcagtacagccaccaaggacacctacgacgcccttcacatgcaggccctgccccctcgctga

SEQ ID NO: 10819 - DNA, 1779 bp, Artificial Sequence
  Synthetic Polynucleotide
atggccttaccagtgaccgccttgctcctgccgctggccttgctgctccacgccgccaggccggacatccagatgacacagagccctagcagcctgtctgccagcgtgggagacagagtgaccatcacatgcaaggccagcgaccacatcaacaactggctggcctggtatcagcagaagcctggacaggcccctaagctgctgatctacggcgctaccacactggaaacaggcgtgcccagcagattttctggcagcggctctggcaccgactacaccctgacaatatccagcctccagcctgaggacttcgccacctactactgtcagcagagctggaacaccccttggacattcggccagggcaccaagctggaaatcaagagaggcggaggcggaagtggaggcggaggatctggcggcggaggctctcaagttcagcttcaacagcctggcgctgagctggtcaaacctggcgcttctgtgaagatgagctgcaaagccagcggctacgccttcagcagctactggatcaactggatgaagcagaaacccggccagggactcgaatggatcggccaaatctatcccggcgacggcgacaccaactacaacggcaagttcaagggcagagccacactgaccgccgatacctctagcagcacagcctacatgcagctgagcagcctgaccagcgaagatagcgccgtgtacttctgtgcccggtccatcacaacagtcgtgggctgcgctatggactattggggccagggaacaagcgtgaccgtgtctagtacgcgtcaagtggtggacacaacaaaagccgtcatcaccctgcaaccaccttgggtttcagtctttcaagaagagacagttaccctgcactgtgaagtcctgcacttgcccggaagcagctccacacagtggttcctcaacggcacagctacccagacaagcaccccttcctaccggatcacatctgcctccgtgaacgattccggcgagtataggtgtcagaggggcctgtctggccgcagcgatcctatccagcttgagattcatcgtggatggttgctcctccaagtgtcctccagggtgttcaccgaaggcgaacctctggcactgaggtgccatgcttggaaagataagctcgtctacaatgtcctctactaccgcaatggcaaggcttttaagttttttcattggaactctaatctcacgatcctgaaaacgaacatctcccacaatgggacataccactgctctggcatgggaaaacatcggtacacctctgccggcatctctgtcacagtcaaagaactgttccctgcaccagtcctgaacgcttccgtgacctctccactgcttgagggaaatctggtcaccctgtcctgcgaaactaagttgctgcttcagaggcccggactccagctctacttttcattctatatgggctctaagaccctgagaggccggaacaccagcagcgaatatcagattctgacagctcggcgcgaggactccgggctctattggtgtgaagctgctacagaggacggaaacgtgctgaaacggtcccctgaactggaactgcaagtcctgggccttcagctgccaactccagtgtggtttcattaccaagtctccttctgtcttgtgatggtcctcctgtttgctgtggacacaggactgtacttttccgtgaaaacgaacatccgcagctccacacgcgattggaaagatcacaagtttaaatggcgcaaagatccccaggacaag

SEQ ID NO: 10820 - DNA, 1611 bp, Artificial Sequence
  Synthetic Polynucleotide
atggccttaccagtgaccgccttgctcctgccgctggccttgctgctccacgccgccaggccggacatccagatgacacagagccctagcagcctgtctgccagcgtgggagacagagtgaccatcacatgcaaggccagcgaccacatcaacaactggctggcctggtatcagcagaagcctggacaggcccctaagctgctgatctacggcgctaccacactggaaacaggcgtgcccagcagattttctggcagcggctctggcaccgactacaccctgacaatatccagcctccagcctgaggacttcgccacctactactgtcagcagagctggaacaccccttggacattcggccagggcaccaagctggaaatcaagagaggcggaggcggaagtggaggcggaggatctggcggcggaggctctcaagttcagcttcaacagcctggcgctgagctggtcaaacctggcgcttctgtgaagatgagctgcaaagccagcggctacgccttcagcagctactggatcaactggatgaagcagaaacccggccagggactcgaatggatcggccaaatctatcccggcgacggcgacaccaactacaacggcaagttcaagggcagagccacactgaccgccgatacctctagcagcacagcctacatgcagctgagcagcctgaccagcgaagatagcgccgtgtacttctgtgcccggtccatcacaacagtcgtgggctgcgctatggactattggggccagggaacaagcgtgaccgtgtctagtacgcgtggaatgaggactgaggatcttcccaaagctgtcgtctttctcgaaccccaatggtatcgggtgctcgaaaaagactctgtgacactgaaatgccaaggggcctactctcccgaggacaactccacacagtggtttcataatgagtccctcatcagctctcaggccagctcttatttcattgatgccgctacagtggacgactccggcgagtatcggtgtcagaccaatctgtctacactgtctgaccccgtgcagcttgaggtccacattggatggttgctcttgcaagccccacgctgggttttcaaagaggaagatccaatccatctgcggtgccacagctggaaaaacaccgctctccacaaagtcacatacctgcaaaatggcaaaggacgcaaatacttccatcacaattccgatttttacattccgaaggctaccctgaaagacagcggcagctatttctgccggggactcgtcggctccaagaatgtgtcctccgaaaccgtgaatatcacgctgcaagtcctgggccttcagctgccaactccagtgtggtttcatgtcctgttctatctggctgtggggattatgttccttgtgaataccgtgctctgggttaccattcggaaagaactcaagcgcaagaaaaaatgggatcttgagataagcctggacagcgggcatgagaagaaagtcatcagttcccttcaagaggacagacatctcgaagaggaactcaaatgtcaagaacaaaaagaagaacaactccaagagggtgtccatcggaaagagccacagggcgctaca

SEQ ID NO: 10821 - DNA, 2001 bp, Artificial Sequence
  Synthetic Polynucleotide
atggccttaccagtgaccgccttgctcctgccgctggccttgctgctccacgccgccaggccggacatccagatgacacagagccctagcagcctgtctgccagcgtgggagacagagtgaccatcacatgcaaggccagcgaccacatcaacaactggctggcctggtatcagcagaagcctggacaggcccctaagctgctgatctacggcgctaccacactggaaacaggcgtgcccagcagattttctggcagcggctctggcaccgactacaccctgacaatatccagcctccagcctgaggacttcgccacctactactgtcagcagagctggaacaccccttggacattcggccagggcaccaagctggaaatcaagagaggcggaggcggaagtggaggcggaggatctggcggcggaggctctcaagttcagcttcaacagcctggcgctgagctggtcaaacctggcgcttctgtgaagatgagctgcaaagccagcggctacgccttcagcagctactggatcaactggatgaagcagaaacccggccagggactcgaatggatcggccaaatctatcccggcgacggcgacaccaactacaacggcaagttcaagggcagagccacactgaccgccgatacctctagcagcacagcctacatgcagctgagcagcctgaccagcgaagatagcgccgtgtacttctgtgcccggtccatcacaacagtcgtgggctgcgctatggactattggggccagggaacaagcgtgaccgtgtctagtacgcgtggaatgaggactgaggatcttcccaaagctgtcgtctttctcgaaccccaatggtatcgggtgctcgaaaaagactctgtgacactgaaatgccaaggggcctactctcccgaggacaactccacacagtggtttcataatgagtccctcatcagctctcaggccagctcttatttcattgatgccgctacagtggacgactccggcgagtatcggtgtcagaccaatctgtctacactgtctgaccccgtgcagcttgaggtccacattggatggttgctcttgcaagccccacgctgggttttcaaagaggaagatccaatccatctgcggtgccacagctggaaaaacaccgctctccacaaagtcacatacctgcaaaatggcaaaggacgcaaatacttccatcacaattccgatttttacattccgaaggctaccctgaaagacagcggcagctatttctgccggggactcgtcggctccaagaatgtgtcctccgaaaccgtgaatatcacggcgaagcccaccacgacgccagcgccgcgaccaccaacaccggcgcccaccatcgcgtcgcagcccctgtccctgcgcccagaggcgtgccggccagcggcggggggcgcagtgcacacgagggggctggacttcgcctgtgacatctacatctgggcgcccttggccgggacttgtggggtccttctcctgtcactggttatcaccctttactgcaaacggggcagaaagaaactcctgtatatattcaaacaaccatttatgagaccagtacaaactactcaagaggaagatggctgtagctgccgatttccagaagaagaagaaggaggatgtgaactgagagtgaagttcagcaggagcgcagacgcccccgcgtaccagcagggccagaaccagctctataacgagctgaatctaggacgaagagaggagtacgatgttttggacaagagacgtggccgggaccctgagatggggggaaagccgagaaggaagaaccctcaggaaggcctgtacaatgaactgcagaaagataagatggcggaggcctacagtgagattgggatgaaaggcgagcgccggaggggcaaggggcacgatggcctttaccagggtctcagtacagccaccaaggacacctacgacgcccttcacatgcaggccctgccccctcgctga

SEQ ID NO: 10822 - DNA, 1617 bp, Artificial Sequence
  Synthetic Polynucleotide
atggccttaccagtgaccgccttgctcctgccgctggccttgctgctccacgccgccaggccggacatccagatgacacagagccctagcagcctgtctgccagcgtgggagacagagtgaccatcacatgcaaggccagcgaccacatcaacaactggctggcctggtatcagcagaagcctggacaggcccctaagctgctgatctacggcgctaccacactggaaacaggcgtgcccagcagattttctggcagcggctctggcaccgactacaccctgacaatatccagcctccagcctgaggacttcgccacctactactgtcagcagagctggaacaccccttggacattcggccagggcaccaagctggaaatcaagagaggcggaggcggaagtggaggcggaggatctggcggcggaggctctcaagttcagcttcaacagcctggcgctgagctggtcaaacctggcgcttctgtgaagatgagctgcaaagccagcggctacgccttcagcagctactggatcaactggatgaagcagaaacccggccagggactcgaatggatcggccaaatctatcccggcgacggcgacaccaactacaacggcaagttcaagggcagagccacactgaccgccgatacctctagcagcacagcctacatgcagctgagcagcctgaccagcgaagatagcgccgtgtacttctgtgcccggtccatcacaacagtcgtgggctgcgctatggactattggggccagggaacaagcgtgaccgtgtctagtacgcgtggaatgaggactgaggatcttcccaaagctgtcgtctttctcgaaccccaatggtatcgggtgctcgaaaaagactctgtgacactgaaatgccaaggggcctactctcccgaggacaactccacacagtggtttcataatgagtccctcatcagctctcaggccagctcttatttcattgatgccgctacagtggacgactccggcgagtatcggtgtcagaccaatctgtctacactgtctgaccccgtgcagcttgaggtccacattggatggttgctcttgcaagccccacgctgggttttcaaagaggaagatccaatccatctgcggtgccacagctggaaaaacaccgctctccacaaagtcacatacctgcaaaatggcaaaggacgcaaatacttccatcacaattccgatttttacattccgaaggctaccctgaaagacagcggcagctatttctgccggggactcgtcggctccaagaatgtgtcctccgaaaccgtgaatatcacgattacccaaggactggctgtgcctacaatctctagcttctttccgcctggagtcctgttctatctggctgtggggattatgttccttgtgaataccgtgctctgggttaccattcggaaagaactcaagcgcaagaaaaaatgggatcttgagataagcctggacagcgggcatgagaagaaagtcatcagttcccttcaagaggacagacatctcgaagaggaactcaaatgtcaagaacaaaaagaagaacaactccaagagggtgtccatcggaaagagccacagggcgctaca

SEQ ID NO: 10823 - DNA, 2862 bp, Artificial Sequence
  Synthetic Polynucleotide
atggccttaccagtgaccgccttgctcctgccgctggccttgctgctccacgccgccaggccggcatgcggcgtgacacagagccccacacacctgattaagaccagaggccagcaggccacactgagatgcagccctatcagcggccacaccagcgtgtactggtatcagcaggctctcggactgggcctccagttcctgctttggtacgacgagggcgaagagagaaaccggggcaacttccctcctcggttttccggcagacagttccccaactacagcagcgagctgaacgtgaacgccctggaactggaagatagcgccctgtacctgtgtgccagctctctcggcggagatgaactgggagccgatggcaacgagcagttctttggccctggcaccagactgaccgtgctggaaggtaccggcggaggcggatctggcggcggaggtagcggtggcggaggatctgaattcaatgctggcgtgacccagacacctaagttccaggtgctgaaaaccggccagagcatgaccctgcaatgcgcccaggacatgaaccatgagtacatgagctggtacagacaggaccccggcatgggcctgagactgatccactactctgtggctatccagaccaccgaccagggcgaagtgcccaatggctacaacgtgtccagaagcaccatcgaggacttcccactgagactgctgtctgccgctcctagccagaccagcgtgtacttttgtgccagcagctacctgggcaacaccggcgagctgttttttggcgagggcagcagactgaccgtgctcgaggacctgaagaacgtgttcccacctgaggtggccgtgttcgagcctagcgaggccgagatcagccacacccagaaagccaccctcgtgtgcctggctaccggcttctaccccgaccatgtggaactgtcttggtgggtcaacggcaaagaggtgcacagcggcgtgtctaccgacccccagccactgaaagaacagcccgccctgaacgacagccggtactgcctgagcagcagactgagagtgtccgccaccttctggcagaacccccggaaccacttcagatgccaggtgcagttctacggcctgagcgagaacgacgagtggacccaggacagagccaagcccgtgacccagatcgtgtctgccgaagcctggggcagagccgattgcggatcccagagcttcggcctgctggaccccaagctgtgctacctgctggatggcatcctgttcatctacggcgtgatcctgaccgccctgttcctgagagtgaagttcagcagaagcgccgacgcccctgcctaccagcagggacagaaccaactgtacaacgagctgaacctgggcagacgggaagagtacgacgtgctggacaagcggagaggcagggaccctgagatgggcggaaagccccagcggagaaagaacccccaggaaggactgtataacgaactccagaaagacaagatggccgaagcctacagcgagatcggcatgaagggcgagcggagaagaggcaagggccacgatggcctgtaccagggcctgagcaccgccaccaaggacacctatgacgccctgcacatgcaggccctgcctccaagaagggccaagcgatctggatctggagcaacaaacttctcactactcaaacaagcaggtgacgtggaggagaatcccgggcctactagtatggactggatttggcgcatccttttccttgtcggcgctgctaccggcgcgcattccttcgaacaagaagtgacacagatccctgccgctctgtctgtgcctgagggcgaaaacctggtgctgaactgctccttcaccgacagcgccatctacaacctccagtggttcaggcaggaccctggaaagggactgacaagcctgctgctgatccagagcagccagagagagcagacctccggcagactgaatgccagcctggataagagcagcggcaggtctaccctgtatatcgccgcttctcagcctggcgatagcgccacatatctgtgtgctgtgcggcctacaagcggcggcagctacatccctacatttggcagaggcaccagcctgatcgtgcacccttatacgcgtatccagaaccctgatcctgccgtgtaccagctgcgggatagcaagagcagcgacaagagcgtgtgtctgttcaccgacttcgacagccagaccaacgtgtcccagagcaaggactccgacgtgtacatcaccgataagaccgtgctggacatgcggagcatggacttcaagagcaactccgccgtggcctggtccaacaagtccgatttcgcctgcgccaacgccttcaacaacagcattatccccgaggacacattcttcccaagccccgagagcagctgcggtacccagagttttgggttgttggaccctaaattgtgctatctgttggacggaatcctgttcatttacggagtgatcctgaccgcattgttcctgcgggttaagttttccagatccgcagacgcacccgcttaccaacaagggcagaaccaactctacaatgaacttaatttggggcggagggaagagtacgacgttctggacaaaaggaggggacgagatcccgagatgggcggaaagcctcagcgaaggaagaatccgcaagaggggctttataacgaactccagaaagataaaatggcagaagcctatagtgagattgggatgaagggagaaaggaggaggggtaaaggtcacgatgggttgtaccaaggattgagcacagccactaaagatacctatgatgcgctccacatgcaggccctgccgccaagataa

SEQ ID NO: 10824 - DNA, 3618 bp, Artificial Sequence
  Synthetic Polynucleotide
atggccttaccagtgaccgccttgctcctgccgctggccttgctgctccacgccgccaggccgctgcctgttctgacacagcctccatccgtgtctgtggcccctggaaagaccgccagaatcacatgcggcggcaacaacatcggcagcaagagcgtgcactggtatcagcagaagcctggacaggctcctgtgctggtggtgtacgacgacagcgatagacctagcggcatccccgagagattcagcggcagcaattccggcaataccgccacactgaccatcagcagagtggaagctggcgacgaggccgactactactgccaagtgtgggacagcagcagcgactacgtggtgtttggcggcggaacaaagctgacagtgcttggacagcctaaggccaatcctaccgtgacactgttccctccaagcagcgaagaactccaggccaacaaggccacacttgtgtgcctgatctccgacttctaccctggggctgtgacagtggcttggaaggccgatggatctcctgtgaaagccggcgtggaaaccaccaagccatccaagcagagcaacaacaaatacgccgccagctcctacctgagcctgacacctgagcagtggaagtcccacagatcctacagctgccaagtgacccacgaaggcagcaccgtggaaaagacagtggcccctacagagtgcagcggatcccagagcttcggcctgctggaccccaagctgagctacctgctggatggcatcctgttcatctacggcgtgatcctgaccgccctgttcctgtggcggcggaagcggaaagagaagcagtctgagacaagccccaaagagttcctgaccatctacgaggacgtgaaggacctgaaaacccggcggaaccacgaacaagagcagacctttcctggcggaggcagcaccatctacagcatgatccagagccagagcagcgcccctacaagccaagagcctgcctacacactgtactccctgatccagcctagcagaaagagcggcagccggaagagaaatcacagccccagcttcaacagcacgatctacgaagtgatcggcaagagccagccaaaggctcagaaccctgccagactgagccggaaagagctggaaaacttcgacgtgtacagcactagtagagtgaagttcagcagaagcgccgacgcccctgcctaccagcagggacagaaccaactgtacaacgagctgaacctgggcagacgggaagagtacgacgtgctggacaagcggagaggcagggaccctgagatgggcggaaagccccagcggagaaagaacccccaggaaggactgtataacgaactccagaaagacaagatggccgaagcctacagcgagatcggcatgaagggcgagcggagaagaggcaagggccacgatggcctgtaccagggcctgagcaccgccaccaaggacacctatgacgccctgcacatgcaggccctgcctccaagaagggccaagcgatctggatctggagcaacaaacttctcactactcaaacaagcaggtgacgtggaggagaatcccgggcctatggactggatttggcgcatccttttccttgtcggcgctgctaccggcgcgcattccttcgaagttcaactggtgcagagcggagccgaagtgaagaagccaggcgagagcctgaagattagctgcaaaggcagcggctacagcttcaccagctactggatcggctgggtccgacagatgcctggcaaaggactggaatggatgggcatcatctaccccggcgacagcgacaccagatacagccctagctttcagggccaagtgaccatctccgccgacaagagcatcagcacagcctacctccagtggtcctctctgaaggccagcgataccgccatgtactactgcgccagacaagtctggggatggcaaggcggcatgtaccccaggtctaactggtggtacaacctggactcttggggccagggcacactggtcacagtctcttctgcctctacaaagggaccctccgtgtttcctctggctcccagcagcaagtctacaagcggaggaacagccgctctgggctgcctggtcaaggattactttcccgagcctgtgaccgtgtcctggaatagcggagcactgacaagcggcgtgcacacctttccagccgtgctgcaaagcagcggcctgtactctctgagcagcgtggtcacagtgcctagctctagcctgggcacccagacctacatctgcaatgtgaaccacaagcctagcaacaccaaggtggacaagagagtggaacccaagagctgtggtaccacaacgccgggcgaaaggagttccttgccggccttttaccccggcacaagcggaagctgtagtgggtgtggaagcctcagcctcccacttcttgcgggcctcgtcgcggcagatgcagtagcttcacttcttattgtaggcgcggtatttctctgtgctcgaccaaggaggtcacccgctcaggaggatggtaaggtgtatataaatatgccaggacgcggaagctctagacgggttaagttttccagatccgcagacgcacccgcttaccaacaagggcagaaccaactctacaatgaacttaatttggggcggagggaagagtacgacgttctggacaaaaggaggggacgagatcccgagatgggcggaaagcctcagcgaaggaagaatccgcaagaggggctttataacgaactccagaaagataaaatggcagaagcctatagtgagattgggatgaagggagaaaggaggaggggtaaaggtcacgatgggttgtaccaaggattgagcacagccactaaagatacctatgatgcgctccacatgcaggccctgccgccaagacgcgccaagagaagcggatctggcgtgaagcagaccctgaatttcgacctgctgaagctggctggcgacgtggaatccaacccaggccctggccatatgaccgagtacaagcccacggtgcgcctcgccacccgcgacgacgtccccagggccgtacgcaccctcgccgccgcgttcgccgactaccccgccacgcgccacaccgtcgatccggaccgccacatcgagcgggtcaccgagctgcaagaactcttcctcacgcgcgtcgggctcgacatcggcaaggtgtgggtcgcggacgacggcgccgcggtggcggtctggaccacgccggagagcgtcgaagcgggggcggtgttcgccgagatcggcccgcgcatggccgagttgagcggttcccggctggccgcgcagcaacagatggaaggcctcctggcgccgcaccggcccaaggagcccgcgtggttcctggccaccgtcggcgtctcgcccgaccaccagggcaagggtctgggcagcgccgtcgtgctccccggagtggaggcggccgagcgcgccggggtgcccgccttcctggagacctccgcgccccgcaacctccccttctacgagcggctcggcttcaccgtcaccgccgacgtcgaggtgcccgaaggaccgcgcacctggtgcatgacccgcaagcccggtgcctga

SEQ ID NO: 10825 - DNA, 3399 bp, Artificial Sequence
  Synthetic Polynucleotide
atggccttaccagtgaccgccttgctcctgccgctggccttgctgctccacgccgccaggccggcatgcctgtgggtttcacagcctccagagatcagaaccctggaaggcagcagcgccttcctgccttgcagcttcaatgcctctcagggcagactggctatcggcagcgtgacctggttcagagatgaggtggtgcccggcaaagaagtgcggaacggcacccctgagtttagaggaaggctggcccctctggcctccagcagatttctgcacgatcaccaggccgagctgcacatcagagatgtgcgaggacacgacgccagcatctacgtgtgcagagtggaagtgctcggcctcggagttggcacaggcaatggaacaagactggtggtggaaaaagagcaccctcagctcggaggtaccggcggaggcggatctggcggcggaggtagcggtggcggaggatctgaattcgacatccagatgacacagagccctagcagcctgtctgccagcgtgggagacagagtgaccatcacatgcaaggccagcgaccacatcaacaactggctggcctggtatcagcagaagcctggacaggcccctaagctgctgatctacggcgctaccacactggaaacaggcgtgcccagcagattttctggcagcggctctggcaccgactacaccctgacaatatccagcctccagcctgaggacttcgccacctactactgtcagcagagctggaacaccccttggacattcggccagggcaccaagctggaaatcaagagactcgaggacctgaagaacgtgttcccacctgaggtggccgtgttcgagcctagcgaggccgagatcagccacacccagaaagccaccctcgtgtgcctggctaccggcttctaccccgaccatgtggaactgtcttggtgggtcaacggcaaagaggtgcacagcggcgtgtgtaccgacccccagccactgaaagaacagcccgccctgaacgacagccggtactgcctgagcagcagactgagagtgtccgccaccttctggcagaacccccggaaccacttcagatgccaggtgcagttctacggcctgagcgagaacgacgagtggacccaggacagagccaagcccgtgacccagatcgtgtctgccgaagcctggggcagagccgattgcggctttaccagcgagagctaccagcagggcgtgctgagcgccaccatcctgtacgagatcctgctgggcaaggccaccctgtacgccgtgctggtgtctgccctggtgctgatggctatggtcaagcggaaggacagccggggaagggccaagcgatctggatctggagcaacaaacttctcactactcaaacaagcaggtgacgtggaggagaatcccgggcctactagtgccaccatggactggatttggcgcatccttttccttgtcggcgctgctaccggcgcccattccgggcccgaagtgcagctggttgaatctggcggaggactggttcaggctggcggatctctgagactgtcttgtgccgccagcggcagaacctttagcatgggctggtttagacaggcccctggcaaagagagagagttcgtcgccgccatcacatactctggcggcagcccttactacgccgactctgtgaagggcagattcaccatcagccgggacaacgccaagaacaccgtgtacctccagatgaacagcctgaagcctgaggacaccgccgtgtactactgcgccgccaatccaacatacggcagcgactggaacgccgagaattggggccagggaacccaagtgacagtgtctagcggatccggcggcggaggatctggcggaggcggatctgggggcggaggctctttcgaacaagttcagcttcaacagcctggcgctgagctggtcaaacctggcgcttctgtgaagatgagctgcaaagccagcggctacgccttcagcagctactggatcaactggatgaagcagaaacccggccagggactcgaatggatcggccaaatctatcccggcgacggcgacaccaactacaacggcaagttcaagggcagagccacactgaccgccgatacctctagcagcacagcctacatgcagctgagcagcctgaccagcgaagatagcgccgtgtacttctgtgcccggtccatcacaacagtcgtgggctgcgctatggactattggggccagggaacaagcgtgaccgtgtctagtacgcgtatccagaaccctgatcctgccgtgtaccagctgcgggatagcaagagcagcgacaagagcgtgtgtctgttcaccgacttcgacagccagaccaacgtgtcccagagcaaggactccgacgtgtacatcaccgataagtgcgtgctggacatgcggagcatggacttcaagagcaactccgccgtggcctggtccaacaagtccgatttcgcctgcgccaacgccttcaacaacagcattatccccgaggacacattcttcccaagccccgagagcagctgcgacgtgaagctggtggaaaagagcttcgagacagacaccaacctgaacttccagaacctgagcgtgatcggcttcagaatcctgctgctgaaagtggccggctttaacctgctgatgaccctgcggctgtggtccagccgcgccaagagaagcggatctggcgtgaagcagaccctgaatttcgacctgctgaagctggctggcgacgtggaatccaacccaggcccttctagaggccatatgaccgagtacaagcccacggtgcgcctcgccacccgcgacgacgtccccagggccgtacgcaccctcgccgccgcgttcgccgactaccccgccacgcgccacaccgtcgatccggaccgccacatcgagcgggtcaccgagctgcaagaactcttcctcacgcgcgtcgggctcgacatcggcaaggtgtgggtcgcggacgacggcgccgcggtggcggtctggaccacgccggagagcgtcgaagcgggggcggtgttcgccgagatcggcccgcgcatggccgagttgagcggttcccggctggccgcgcagcaacagatggaaggcctcctggcgccgcaccggcccaaggagcccgcgtggttcctggccaccgtcggcgtctcgcccgaccaccagggcaagggtctgggcagcgccgtcgtgctccccggagtggaggcggccgagcgcgccggggtgcccgccttcctggagacctccgcgccccgcaacctccccttctacgagcggctcggcttcaccgtcaccgccgacgtcgaggtgcccgaaggaccgcgcacctggtgcatgacccgcaagcccggtgcctga

SEQ ID NO: 10826 - DNA, 2964 bp, Artificial Sequence
  Synthetic Polynucleotide
atggccttaccagtgaccgccttgctcctgccgctggccttgctgctccacgccgccaggccggcatgccagtctaaagcccaggtgctgcaatctgtggccggacagacactgacagtgcggtgtcagtatcctcctaccggcagcctgtacgagaagaaaggctggtgcaaagaggccagcgcactcgtctgtatcagactggtcaccagcagcaagccccggacaatggcatggaccagcagattcaccatctgggacgatcccgacgccggcttctttaccgtgaccatgaccgacctgagagaagaggacagcggccactactggtgccggatctacagacccagcgacaacagcgtgtccctcgaggacctgaagaacgtgttcccacctgaggtggccgtgttcgagcctagcgaggccgagatcagccacacccagaaagccaccctcgtgtgcctggctaccggcttctaccccgaccatgtggaactgtcttggtgggtcaacggcaaagaggtgcacagcggcgtgtgtaccgacccccagccactgaaagaacagcccgccctgaacgacagccggtactgcctgagcagcagactgagagtgtccgccaccttctggcagaacccccggaaccacttcagatgccaggtgcagttctacggcctgagcgagaacgacgagtggacccaggacagagccaagcccgtgacccagatcgtgtctgccgaagcctggggcagagccgattgcggctttaccagcgagagctaccagcagggcgtgctgagcgccaccatcctgtacgagatcctgctgggcaaggccaccctgtacgccgtgctggtgtctgccctggtgctgatggctatggtcaagcggaaggacagccggggaagggccaagcgatctggatctggagcaacaaacttctcactactcaaacaagcaggtgacgtggaggagaatcccgggcctactagtgccaccatggactggatttggcgcatccttttccttgtcggcgctgctaccggcgcccattccgggcccgaagtgcagctggttgaatctggcggaggactggttcaggctggcggatctctgagactgtcttgtgccgccagcggcagaacctttagcatgggctggtttagacaggcccctggcaaagagagagagttcgtcgccgccatcacatactctggcggcagcccttactacgccgactctgtgaagggcagattcaccatcagccgggacaacgccaagaacaccgtgtacctccagatgaacagcctgaagcctgaggacaccgccgtgtactactgcgccgccaatccaacatacggcagcgactggaacgccgagaattggggccagggaacccaagtgacagtgtctagcggatccggcggcggaggatctggcggaggcggatctgggggcggaggctctttcgaacaagttcagcttcaacagcctggcgctgagctggtcaaacctggcgcttctgtgaagatgagctgcaaagccagcggctacgccttcagcagctactggatcaactggatgaagcagaaacccggccagggactcgaatggatcggccaaatctatcccggcgacggcgacaccaactacaacggcaagttcaagggcagagccacactgaccgccgatacctctagcagcacagcctacatgcagctgagcagcctgaccagcgaagatagcgccgtgtacttctgtgcccggtccatcacaacagtcgtgggctgcgctatggactattggggccagggaacaagcgtgaccgtgtctagtacgcgtatccagaaccctgatcctgccgtgtaccagctgcgggatagcaagagcagcgacaagagcgtgtgtctgttcaccgacttcgacagccagaccaacgtgtcccagagcaaggactccgacgtgtacatcaccgataagtgcgtgctggacatgcggagcatggacttcaagagcaactccgccgtggcctggtccaacaagtccgatttcgcctgcgccaacgccttcaacaacagcattatccccgaggacacattcttcccaagccccgagagcagctgcgacgtgaagctggtggaaaagagcttcgagacagacaccaacctgaacttccagaacctgagcgtgatcggcttcagaatcctgctgctgaaagtggccggctttaacctgctgatgaccctgcggctgtggtccagccgcgccaagagaagcggatctggcgtgaagcagaccctgaatttcgacctgctgaagctggctggcgacgtggaatccaacccaggcccttctagaggccatatgaccgagtacaagcccacggtgcgcctcgccacccgcgacgacgtccccagggccgtacgcaccctcgccgccgcgttcgccgactaccccgccacgcgccacaccgtcgatccggaccgccacatcgagcgggtcaccgagctgcaagaactcttcctcacgcgcgtcgggctcgacatcggcaaggtgtgggtcgcggacgacggcgccgcggtggcggtctggaccacgccggagagcgtcgaagcgggggcggtgttcgccgagatcggcccgcgcatggccgagttgagcggttcccggctggccgcgcagcaacagatggaaggcctcctggcgccgcaccggcccaaggagcccgcgtggttcctggccaccgtcggcgtctcgcccgaccaccagggcaagggtctgggcagcgccgtcgtgctccccggagtggaggcggccgagcgcgccggggtgcccgccttcctggagacctccgcgccccgcaacctccccttctacgagcggctcggcttcaccgtcaccgccgacgtcgaggtgcccgaaggaccgcgcacctggtgcatgacccgcaagcccggtgcctga

SEQ ID NO: 10827 - DNA, 3345 bp, Artificial Sequence
  Synthetic Polynucleotide
atggccttaccagtgaccgccttgctcctgccgctggccttgctgctccacgccgccaggccggcatgccagtctaaagcccaggtgctgcaatctgtggccggacagacactgacagtgcggtgtcagtatcctcctaccggcagcctgtacgagaagaaaggctggtgcaaagaggccagcgcactcgtctgtatcagactggtcaccagcagcaagccccggacaatggcatggaccagcagattcaccatctgggacgatcccgacgccggcttctttaccgtgaccatgaccgacctgagagaagaggacagcggccactactggtgccggatctacagacccagcgacaacagcgtgtccggtaccggcggaggcggatctggcggcggaggtagcggtggcggaggatctgaattcgacatccagatgacacagagccctagcagcctgtctgccagcgtgggagacagagtgaccatcacatgcaaggccagcgaccacatcaacaactggctggcctggtatcagcagaagcctggacaggcccctaagctgctgatctacggcgctaccacactggaaacaggcgtgcccagcagattttctggcagcggctctggcaccgactacaccctgacaatatccagcctccagcctgaggacttcgccacctactactgtcagcagagctggaacaccccttggacattcggccagggcaccaagctggaaatcaagagactcgaggacctgaagaacgtgttcccacctgaggtggccgtgttcgagcctagcgaggccgagatcagccacacccagaaagccaccctcgtgtgcctggctaccggcttctaccccgaccatgtggaactgtcttggtgggtcaacggcaaagaggtgcacagcggcgtgtgtaccgacccccagccactgaaagaacagcccgccctgaacgacagccggtactgcctgagcagcagactgagagtgtccgccaccttctggcagaacccccggaaccacttcagatgccaggtgcagttctacggcctgagcgagaacgacgagtggacccaggacagagccaagcccgtgacccagatcgtgtctgccgaagcctggggcagagccgattgcggctttaccagcgagagctaccagcagggcgtgctgagcgccaccatcctgtacgagatcctgctgggcaaggccaccctgtacgccgtgctggtgtctgccctggtgctgatggctatggtcaagcggaaggacagccggggaagggccaagcgatctggatctggagcaacaaacttctcactactcaaacaagcaggtgacgtggaggagaatcccgggcctactagtgccaccatggactggatttggcgcatccttttccttgtcggcgctgctaccggcgcccattccgggcccgaagtgcagctggttgaatctggcggaggactggttcaggctggcggatctctgagactgtcttgtgccgccagcggcagaacctttagcatgggctggtttagacaggcccctggcaaagagagagagttcgtcgccgccatcacatactctggcggcagcccttactacgccgactctgtgaagggcagattcaccatcagccgggacaacgccaagaacaccgtgtacctccagatgaacagcctgaagcctgaggacaccgccgtgtactactgcgccgccaatccaacatacggcagcgactggaacgccgagaattggggccagggaacccaagtgacagtgtctagcggatccggcggcggaggatctggcggaggcggatctgggggcggaggctctttcgaacaagttcagcttcaacagcctggcgctgagctggtcaaacctggcgcttctgtgaagatgagctgcaaagccagcggctacgccttcagcagctactggatcaactggatgaagcagaaacccggccagggactcgaatggatcggccaaatctatcccggcgacggcgacaccaactacaacggcaagttcaagggcagagccacactgaccgccgatacctctagcagcacagcctacatgcagctgagcagcctgaccagcgaagatagcgccgtgtacttctgtgcccggtccatcacaacagtcgtgggctgcgctatggactattggggccagggaacaagcgtgaccgtgtctagtacgcgtatccagaaccctgatcctgccgtgtaccagctgcgggatagcaagagcagcgacaagagcgtgtgtctgttcaccgacttcgacagccagaccaacgtgtcccagagcaaggactccgacgtgtacatcaccgataagtgcgtgctggacatgcggagcatggacttcaagagcaactccgccgtggcctggtccaacaagtccgatttcgcctgcgccaacgccttcaacaacagcattatccccgaggacacattcttcccaagccccgagagcagctgcgacgtgaagctggtggaaaagagcttcgagacagacaccaacctgaacttccagaacctgagcgtgatcggcttcagaatcctgctgctgaaagtggccggctttaacctgctgatgaccctgcggctgtggtccagccgcgccaagagaagcggatctggcgtgaagcagaccctgaatttcgacctgctgaagctggctggcgacgtggaatccaacccaggcccttctagaggccatatgaccgagtacaagcccacggtgcgcctcgccacccgcgacgacgtccccagggccgtacgcaccctcgccgccgcgttcgccgactaccccgccacgcgccacaccgtcgatccggaccgccacatcgagcgggtcaccgagctgcaagaactcttcctcacgcgcgtcgggctcgacatcggcaaggtgtgggtcgcggacgacggcgccgcggtggcggtctggaccacgccggagagcgtcgaagcgggggcggtgttcgccgagatcggcccgcgcatggccgagttgagcggttcccggctggccgcgcagcaacagatggaaggcctcctggcgccgcaccggcccaaggagcccgcgtggttcctggccaccgtcggcgtctcgcccgaccaccagggcaagggtctgggcagcgccgtcgtgctccccggagtggaggcggccgagcgcgccggggtgcccgccttcctggagacctccgcgccccgcaacctccccttctacgagcggctcggcttcaccgtcaccgccgacgtcgaggtgcccgaaggaccgcgcacctggtgcatgacccgcaagcccggtgcctga

SEQ ID NO: 10828 - DNA, 3396 bp, Artificial Sequence; identical to SEQ ID NO: 7654
  Synthetic Polynucleotide

SEQ ID NO: 10829 - DNA, 2874 bp, Artificial Sequence; identical to SEQ ID NO: 1601
  Synthetic Polynucleotide

SEQ ID NO: 10830 - DNA, 2550 bp, Artificial Sequence; identical to SEQ ID NO: 1756
  Synthetic Polynucleotide

SEQ ID NO: 10831 - protein, 143 aa, Artificial Sequence; identical to SEQ ID NO: 3483
  Synthetic Polypeptide

SEQ ID NO: 10832 - protein, 595 aa, Artificial Sequence
  Synthetic Polypeptide
MALPVTALLLPLALLLHAARPDIQMTQSPSSLSASVGDRVTITCKASDHINNWLAWYQQKPGQAPKLLIYGATTLETGVPSRFSGSGSGTDYTLTISSLQPEDFATYYCQQSWNTPWTFGQGTKLEIKRGGGGSGGGGSGGGGSQVQLQQPGAELVKPGASVKMSCKASGYAFSSYWINWMKQKPGQGLEWIGQIYPGDGDTNYNGKFKGRATLTADTSSSTAYMQLSSLTSEDSAVYFCARSITTVVGCAMDYWGQGTSVTVSSTRQVVDTTKAVITLQPPWVSVFQEETVTLHCEVLHLPGSSSTQWFLNGTATQTSTPSYRITSASVNDSGEYRCQRGLSGRSDPIQLEIHRGWLLLQVSSRVFTEGEPLALRCHAWKDKLVYNVLYYRNGKAFKFFHWNSNLTILKTNISHNGTYHCSGMGKHRYTSAGISVTVKELFPAPVLNASVTSPLLEGNLVTLSCETKLLLQRPGLQLYFSFYMGSKTLRGRNTSSEYQILTARREDSGLYWCEAATEDGNVLKRSPELEITQGLAVPTISSFFPPGYQVSFCLVMVLLFAVDTGLYFSVKTNIRSSTRDWKDHKFKWRKDPQDK

SEQ ID NO: 10833 - protein, 756 aa, Artificial Sequence
  Synthetic Polypeptide
MALPVTALLLPLALLLHAARPDIQMTQSPSSLSASVGDRVTITCKASDHINNWLAWYQQKPGQAPKLLIYGATTLETGVPSRFSGSGSGTDYTLTISSLQPEDFATYYCQQSWNTPWTFGQGTKLEIKRGGGGSGGGGSGGGGSQVQLQQPGAELVKPGASVKMSCKASGYAFSSYWINWMKQKPGQGLEWIGQIYPGDGDTNYNGKFKGRATLTADTSSSTAYMQLSSLTSEDSAVYFCARSITTVVGCAMDYWGQGTSVTVSSTRQVVDTTKAVITLQPPWVSVFQEETVTLHCEVLHLPGSSSTQWFLNGTATQTSTPSYRITSASVNDSGEYRCQRGLSGRSDPIQLEIHRGWLLLQVSSRVFTEGEPLALRCHAWKDKLVYNVLYYRNGKAFKFFHWNSNLTILKTNISHNGTYHCSGMGKHRYTSAGISVTVKELFPAPVLNASVTSPLLEGNLVTLSCETKLLLQRPGLQLYFSFYMGSKTLRGRNTSSEYQILTARREDSGLYWCEAATEDGNVLKRSPELEAKPTTTPAPRPPTPAPTIASQPLSLRPEACRPAAGGAVHTRGLDFACDIYIWAPLAGTCGVLLLSLVITLYCKRGRKKLLYIFKQPFMRPVQTTQEEDGCSCRFPEEEEGGCELRVKFSRSADAPAYQQGQNQLYNELNLGRREEYDVLDKRRGRDPEMGGKPRRKNPQEGLYNELQKDKMAEAYSEIGMKGERRRGKGHDGLYQGLSTATKDTYDALHMQALPPR

SEQ ID NO: 10834 - protein, 593 aa, Artificial Sequence
  Synthetic Polypeptide
MALPVTALLLPLALLLHAARPDIQMTQSPSSLSASVGDRVTITCKASDHINNWLAWYQQKPGQAPKLLIYGATTLETGVPSRFSGSGSGTDYTLTISSLQPEDFATYYCQQSWNTPWTFGQGTKLEIKRGGGGSGGGGSGGGGSQVQLQQPGAELVKPGASVKMSCKASGYAFSSYWINWMKQKPGQGLEWIGQIYPGDGDTNYNGKFKGRATLTADTSSSTAYMQLSSLTSEDSAVYFCARSITTVVGCAMDYWGQGTSVTVSSTRQVVDTTKAVITLQPPWVSVFQEETVTLHCEVLHLPGSSSTQWFLNGTATQTSTPSYRITSASVNDSGEYRCQRGLSGRSDPIQLEIHRGWLLLQVSSRVFTEGEPLALRCHAWKDKLVYNVLYYRNGKAFKFFHWNSNLTILKTNISHNGTYHCSGMGKHRYTSAGISVTVKELFPAPVLNASVTSPLLEGNLVTLSCETKLLLQRPGLQLYFSFYMGSKTLRGRNTSSEYQILTARREDSGLYWCEAATEDGNVLKRSPELELQVLGLQLPTPVWFHYQVSFCLVMVLLFAVDTGLYFSVKTNIRSSTRDWKDHKFKWRKDPQDK

SEQ ID NO: 10835 - protein, 537 aa, Artificial Sequence
  Synthetic Polypeptide
MALPVTALLLPLALLLHAARPDIQMTQSPSSLSASVGDRVTITCKASDHINNWLAWYQQKPGQAPKLLIYGATTLETGVPSRFSGSGSGTDYTLTISSLQPEDFATYYCQQSWNTPWTFGQGTKLEIKRGGGGSGGGGSGGGGSQVQLQQPGAELVKPGASVKMSCKASGYAFSSYWINWMKQKPGQGLEWIGQIYPGDGDTNYNGKFKGRATLTADTSSSTAYMQLSSLTSEDSAVYFCARSITTVVGCAMDYWGQGTSVTVSSTRGMRTEDLPKAVVFLEPQWYRVLEKDSVTLKCQGAYSPEDNSTQWFHNESLISSQASSYFIDAATVDDSGEYRCQTNLSTLSDPVQLEVHIGWLLLQAPRWVFKEEDPIHLRCHSWKNTALHKVTYLQNGKGRKYFHHNSDFYIPKATLKDSGSYFCRGLVGSKNVSSETVNITLQVLGLQLPTPVWFHVLFYLAVGIMFLVNTVLWVTIRKELKRKKKWDLEISLDSGHEKKVISSLQEDRHLEEELKCQEQKEEQLQEGVHRKEPQGAT

SEQ ID NO: 10836 - protein, 666 aa, Artificial Sequence
  Synthetic Polypeptide
MALPVTALLLPLALLLHAARPDIQMTQSPSSLSASVGDRVTITCKASDHINNWLAWYQQKPGQAPKLLIYGATTLETGVPSRFSGSGSGTDYTLTISSLQPEDFATYYCQQSWNTPWTFGQGTKLEIKRGGGGSGGGGSGGGGSQVQLQQPGAELVKPGASVKMSCKASGYAFSSYWINWMKQKPGQGLEWIGQIYPGDGDTNYNGKFKGRATLTADTSSSTAYMQLSSLTSEDSAVYFCARSITTVVGCAMDYWGQGTSVTVSSTRGMRTEDLPKAVVFLEPQWYRVLEKDSVTLKCQGAYSPEDNSTQWFHNESLISSQASSYFIDAATVDDSGEYRCQTNLSTLSDPVQLEVHIGWLLLQAPRWVFKEEDPIHLRCHSWKNTALHKVTYLQNGKGRKYFHHNSDFYIPKATLKDSGSYFCRGLVGSKNVSSETVNITAKPTTTPAPRPPTPAPTIASQPLSLRPEACRPAAGGAVHTRGLDFACDIYIWAPLAGTCGVLLLSLVITLYCKRGRKKLLYIFKQPFMRPVQTTQEEDGCSCRFPEEEEGGCELRVKFSRSADAPAYQQGQNQLYNELNLGRREEYDVLDKRRGRDPEMGGKPRRKNPQEGLYNELQKDKMAEAYSEIGMKGERRRGKGHDGLYQGLSTATKDTYDALHMQALPPR

SEQ ID NO: 10837 - protein, 539 aa, Artificial Sequence
  Synthetic Polypeptide
MALPVTALLLPLALLLHAARPDIQMTQSPSSLSASVGDRVTITCKASDHINNWLAWYQQKPGQAPKLLIYGATTLETGVPSRFSGSGSGTDYTLTISSLQPEDFATYYCQQSWNTPWTFGQGTKLEIKRGGGGSGGGGSGGGGSQVQLQQPGAELVKPGASVKMSCKASGYAFSSYWINWMKQKPGQGLEWIGQIYPGDGDTNYNGKFKGRATLTADTSSSTAYMQLSSLTSEDSAVYFCARSITTVVGCAMDYWGQGTSVTVSSTRGMRTEDLPKAVVFLEPQWYRVLEKDSVTLKCQGAYSPEDNSTQWFHNESLISSQASSYFIDAATVDDSGEYRCQTNLSTLSDPVQLEVHIGWLLLQAPRWVFKEEDPIHLRCHSWKNTALHKVTYLQNGKGRKYFHHNSDFYIPKATLKDSGSYFCRGLVGSKNVSSETVNITITQGLAVPTISSFFPPGVLFYLAVGIMFLVNTVLWVTIRKELKRKKKWDLEISLDSGHEKKVISSLQEDRHLEEELKCQEQKEEQLQEGVHRKEPQGAT

SEQ ID NO: 10838 - protein, 953 aa, Artificial Sequence
  Synthetic Polypeptide
MALPVTALLLPLALLLHAARPACGVTQSPTHLIKTRGQQATLRCSPISGHTSVYWYQQALGLGLQFLLWYDEGEERNRGNFPPRFSGRQFPNYSSELNVNALELEDSALYLCASSLGGDELGADGNEQFFGPGTRLTVLEGTGGGGSGGGGSGGGGSEFNAGVTQTPKFQVLKTGQSMTLQCAQDMNHEYMSWYRQDPGMGLRLIHYSVAIQTTDQGEVPNGYNVSRSTIEDFPLRLLSAAPSQTSVYFCASSYLGNTGELFFGEGSRLTVLEDLKNVFPPEVAVFEPSEAEISHTQKATLVCLATGFYPDHVELSWWVNGKEVHSGVSTDPQPLKEQPALNDSRYCLSSRLRVSATFWQNPRNHFRCQVQFYGLSENDEWTQDRAKPVTQIVSAEAWGRADCGSQSFGLLDPKLCYLLDGILFIYGVILTALFLRVKFSRSADAPAYQQGQNQLYNELNLGRREEYDVLDKRRGRDPEMGGKPQRRKNPQEGLYNELQKDKMAEAYSEIGMKGERRRGKGHDGLYQGLSTATKDTYDALHMQALPPRRAKRSGSGATNFSLLKQAGDVEENPGPTSMDWIWRILFLVGAATGAHSFEQEVTQIPAALSVPEGENLVLNCSFTDSAIYNLQWFRQDPGKGLTSLLLIQSSQREQTSGRLNASLDKSSGRSTLYIAASQPGDSATYLCAVRPTSGGSYIPTFGRGTSLIVHPYTRIQNPDPAVYQLRDSKSSDKSVCLFTDFDSQTNVSQSKDSDVYITDKTVLDMRSMDFKSNSAVAWSNKSDFACANAFNNSIIPEDTFFPSPESSCGTQSFGLLDPKLCYLLDGILFIYGVILTALFLRVKFSRSADAPAYQQGQNQLYNELNLGRREEYDVLDKRRGRDPEMGGKPQRRKNPQEGLYNELQKDKMAEAYSEIGMKGERRRGKGHDGLYQGLSTATKDTYDALHMQALPPR

SEQ ID NO: 10839 - protein, 795 aa, Artificial Sequence
  Synthetic Polypeptide
MALPVTALLLPLALLLHAARPEFNAGVTQTPKFQVLKTGQSMTLQCAQDMNHEYMSWYRQDPGMGLRLIHYSVAIQTTDQGEVPNGYNVSRSTIEDFPLRLLSAAPSQTSVYFCASSYLGNTGELFFGEGSRLTVLEDLKNVFPPEVAVFEPSEAEISHTQKATLVCLATGFYPDHVELSWWVNGKEVHSGVSTDPQPLKEQPALNDSRYCLSSRLRVSATFWQNPRNHFRCQVQFYGLSENDEWTQDRAKPVTQIVSAEAWGRADCGSTTPGERSSLPAFYPGTSGSCSGCGSLSLPLLAGLVAADAVASLLIVGAVFLCARPRRSPAQEDGKVYINMPGRGQEGLYNELQKDKMAEAYSEIGMKGERRRGKGHDGLYQGLSTATKDTYDALHMQALPPRRAKRSGSGATNFSLLKQAGDVEENPGPTSMDWIWRILFLVGAATGAHSFEQEVTQIPAALSVPEGENLVLNCSFTDSAIYNLQWFRQDPGKGLTSLLLIQSSQREQTSGRLNASLDKSSGRSTLYIAASQPGDSATYLCAVRPTSGGSYIPTFGRGTSLIVHPYTRIQNPDPAVYQLRDSKSSDKSVCLFTDFDSQTNVSQSKDSDVYITDKTVLDMRSMDFKSNSAVAWSNKSDFACANAFNNSIIPEDTFFPSPESSCGTTTPGERSSLPAFYPGTSGSCSGCGSLSLPLLAGLVAADAVASLLIVGAVFLCARPRRSPAQEDGKVYINMPGRGQEGLYNELQKDKMAEAYSEIGMKGERRRGKGHDGLYQGLSTATKDTYDALHMQALPPR

SEQ ID NO: 10840 - protein, 783 aa, Artificial Sequence
  Synthetic Polypeptide
MALPVTALLLPLALLLHAARPEFNAGVTQTPKFQVLKTGQSMTLQCAQDMNHEYMSWYRQDPGMGLRLIHYSVAIQTTDQGEVPNGYNVSRSTIEDFPLRLLSAAPSQTSVYFCASSYLGNTGELFFGEGSRLTVLEDLKNVFPPEVAVFEPSEAEISHTQKATLVCLATGFYPDHVELSWWVNGKEVHSGVSTDPQPLKEQPALNDSRYCLSSRLRVSATFWQNPRNHFRCQVQFYGLSENDEWTQDRAKPVTQIVSAEAWGRADCGSLGEPQLCYILDAILFLYGIVLTLLYCRLKIQVRKAAITSYEKSDGVYTGLSTRNQETYETLKHEKPPQQEGLYNELQKDKMAEAYSEIGMKGERRRGKGHDGLYQGLSTATKDTYDALHMQALPPRRAKRSGSGATNFSLLKQAGDVEENPGPTSMDWIWRILFLVGAATGAHSFEQEVTQIPAALSVPEGENLVLNCSFTDSAIYNLQWFRQDPGKGLTSLLLIQSSQREQTSGRLNASLDKSSGRSTLYIAASQPGDSATYLCAVRPTSGGSYIPTFGRGTSLIVHPYTRIQNPDPAVYQLRDSKSSDKSVCLFTDFDSQTNVSQSKDSDVYITDKTVLDMRSMDFKSNSAVAWSNKSDFACANAFNNSIIPEDTFFPSPESSCGTLGEPQLCYILDAILFLYGIVLTLLYCRLKIQVRKAAITSYEKSDGVYTGLSTRNQETYETLKHEKPPQQEGLYNELQKDKMAEAYSEIGMKGERRRGKGHDGLYQGLSTATKDTYDALHMQALPPR

SEQ ID NO: 10841 - protein, 817 aa, Artificial Sequence
  Synthetic Polypeptide
MALPVTALLLPLALLLHAARPEFNAGVTQTPKFQVLKTGQSMTLQCAQDMNHEYMSWYRQDPGMGLRLIHYSVAIQTTDQGEVPNGYNVSRSTIEDFPLRLLSAAPSQTSVYFCASSYLGNTGELFFGEGSRLTVLEDLKNVFPPEVAVFEPSEAEISHTQKATLVCLATGFYPDHVELSWWVNGKEVHSGVSTDPQPLKEQPALNDSRYCLSSRLRVSATFWQNPRNHFRCQVQFYGLSENDEWTQDRAKPVTQIVSAEAWGRADCGSQAQSDCSCSTVSPGVLAGIVMGDLVLTVLIALAVYFLGRLVPRGRGAAEAATRKQRITETESPYQELQGQRSDVYSDLNTQRPYYQEGLYNELQKDKMAEAYSEIGMKGERRRGKGHDGLYQGLSTATKDTYDALHMQALPPRRAKRSGSGATNFSLLKQAGDVEENPGPTSMDWIWRILFLVGAATGAHSFEQEVTQIPAALSVPEGENLVLNCSFTDSAIYNLQWFRQDPGKGLTSLLLIQSSQREQTSGRLNASLDKSSGRSTLYIAASQPGDSATYLCAVRPTSGGSYIPTFGRGTSLIVHPYTRIQNPDPAVYQLRDSKSSDKSVCLFTDFDSQTNVSQSKDSDVYITDKTVLDMRSMDFKSNSAVAWSNKSDFACANAFNNSIIPEDTFFPSPESSCGTQAQSDCSCSTVSPGVLAGIVMGDLVLTVLIALAVYFLGRLVPRGRGAAEAATRKQRITETESPYQELQGQRSDVYSDLNTQRPYYQEGLYNELQKDKMAEAYSEIGMKGERRRGKGHDGLYQGLSTATKDTYDALHMQALPPR

SEQ ID NO: 10842 - protein, 173 aa, Artificial Sequence; identical to SEQ ID NO: 3893
  Synthetic Polypeptide

SEQ ID NO: 10843 - protein, 173 aa, Artificial Sequence; identical to SEQ ID NO: 3893
  Synthetic Polypeptide

SEQ ID NO: 10844 - protein, 173 aa, Artificial Sequence
  Synthetic Polypeptide
GMRTEDLPKAVVFLEPQWYSVLEKDSVTLKCQGAYSPEDNSTQWFHNENLISSQASSYFIDAATVNDSGEYRCQTNLSTLSDPVQLEVHIGWLLLQAPRWVFKEEDPIHLRCHSWKNTALHKVTYLQNGKDRKYFHHNSDFHIPKATLKDSGSYFCRGLVGSKNVSSETVNIT

SEQ ID NO: 10845 - protein, 108 aa, Artificial Sequence; identical to SEQ ID NO: 3765
  Synthetic Polypeptide

SEQ ID NO: 10846 - protein, 99 aa, Artificial Sequence; identical to SEQ ID NO: 3778
  Synthetic Polypeptide

SEQ ID NO: 10847 - protein, 190 aa, Artificial Sequence; identical to SEQ ID NO: 3886
  Synthetic Polypeptide

SEQ ID NO: 10848 - protein, 184 aa, Artificial Sequence
  Synthetic Polypeptide
HEGVHRKPSLLAHPGRLVKSEETVILQCWSDVMFEHFLLHREGMFNDTLRLIGEHHDGVSKANFSISRMTQDLAGTYRCYGSVTHSPYQVSAPSDPLDIVIIGLYEKPSLSAQLGPTVLAGENVTLSCSSRSSYDMYHLSREGEAHERRLPAGPKVNGTFQADFPLGPATHGGTYRCFGSFHDS

SEQ ID NO: 10849 - protein, 184 aa, Artificial Sequence
  Synthetic Polypeptide
HEGVHRKPSLLAHPGRLVKSEETVILQCWSDVRFEHFLLHREGKFKDTLHLIGEHHDGVSKANFSIGPMMQDLAGTYRCYGSVTHSPYQLSAPSDPLDIVITGLYEKPSLSAQPGPTVLAGESVTLSCSSRSSYDMYHLSREGEAHECRFSAGPKVNGTFQADFPLGPATHGGTYRCFGSFRDS

SEQ ID NO: 10850 - protein, 184 aa, Artificial Sequence
  Synthetic Polypeptide
HEGVHRKPSLLAHPGPLVKSEETVILQCWSDVRFQHFLLHREGKFKDTLHLIGEHHDGVSKANFSIGPMMQDLAGTYRCYGSVTHSPYQLSAPSDPLDIVITGLYEKPSLSAQPGPTVLAGESVTLSCSSRSSYDMYHLSREGEAHERRFSAGPKVNGTFQADFPLGPATHGGTYRCFGSFRDS

SEQ ID NO: 10851 - protein, 179 aa, Artificial Sequence
  Synthetic Polypeptide
HEGGQDKPLLSAWPSAVVPRGGHVTLLCRSRLGFTIFSLYKEDGVPVPELYNKIFWKSILMGPVTPAHAGTYRCRGSHPRSPIEWSAPSNPLVIVVTGLFGKPSLSAQPGPTVRTGENVTLSCSSRSSFDMYHLSREGRAHEPRLPAVPSVNGTFQADFPLGPATHGGTYTCFGSLHDS

SEQ ID NO: 10852 - protein, 179 aa, Artificial Sequence
  Synthetic Polypeptide
HEGGQDKPLLSAWPSAVVPRGGHVTLLCRSRLGFTIFSLYKEDGVPVPELYNKIFWKSILMGPVTPAHAGTYRCRGSHPRSPIEWSAPSNPLVIVVTGLFGKPSLSAQPGPTVRTGENVALSCSSRSSFDMYHLSREGRAHEPRLPAVPSVDGTFQADFPLGPATHGGTYTCFSSLHDS

SEQ ID NO: 10853 - protein, 282 aa, Artificial Sequence
  Synthetic Polypeptide
AGPHVGGQDKPFLSAWPSAVVPRGGHVTLRCHYRHRFNNFMLYKEDRIHVPIFHGRLFQESFNMSPVTTAHAGNYTCRGSHPHSPTGWSAPSNPVVIMVTGNHRKPSLLAHPGPLVKSGERVILQCWSDIMFEHFFLHKEGISKDPSRLVGQIHDGVSKANFSIGPMMLALAGTYRCYGSVTHTPYQLSAPSDPLDIVVTGPYEKPSLSAQPGPKVQAGESVTLSCSSRSSYDMYHLSREGGAHERRLPAVRKVNRTFQADFPLGPATHGGTYRCFGSFRHS

SEQ ID NO: 10854 - protein, 274 aa, Artificial Sequence
  Synthetic Polypeptide
LMGGQDKPFLSARPSTVVPRGGHVALQCHYRRGFNNFMLYKEDRSHVPIFHGRIFQESFIMGPVTPAHAGTYRCRGSRPHSLTGWSAPSNPLVIMVTGNHRKPSLLAHPGPLLKSGETVILQCWSDVMFEHFFLHREGISEDPSRLVGQIHDGVSKANFSIGPLMPVLAGTYRCYGSVPHSPYQLSAPSDPLDIVITGLYEKPSLSAQPGPTVQAGENVTLSCSSWSSYDIYHLSREGEAHERRLRAVPKVNRTFQADFPLGPATHGGTYRCFG

SEQ ID NO: 10855 - protein, 274 aa, Artificial Sequence; identical to SEQ ID NO: 10854
  Synthetic Polypeptide

SEQ ID NO: 10856 - protein, 270 aa, Artificial Sequence
  Synthetic Polypeptide
QDKPFLSAWPGTVVSEGQHVTLQCRSRLGFNEFSLSKEDGMPVPELYNRIFRNSFLMGPVTPAHAGTYRCCSSHPHSPTGWSAPSNPVVIMVTGVHRKPSLLAHPGPLVKSGETVILQCWSDVRFERFLLHREGITEDPLRLVGQLHDAGSQVNYSMGPMTPALAGTYRCFGSVTHLPYELSAPSDPLDIVVVGLYGKPSLSAQPGPTVQAGENVTLSCSSRSLFDIYHLSREAEAGELRLTAVLRVNGTFQANFPLGPVTHGGNYRCFG

SEQ ID NO: 10857 - protein, 181 aa, Artificial Sequence
  Synthetic Polypeptide
WAHVGGQDKPFCSAWPSAVVPQGGHVTLRCHYRRGFNIFTLYKKDGVPVPELYNRIFWNSFLISPVTPAHAGTYRCRGFHPHSPTEWSAPSNPLVIMVTGLYEKPSLTARPGPTVRAGENVTLSCSSQSSFDIYHLSREGEAHELRLPAVPSINGTFQADFPLGPATHGETYRCFGSFHGS

SEQ ID NO: 10858 - protein, 181 aa, Artificial Sequence; identical to SEQ ID NO: 10857
  Synthetic Polypeptide

SEQ ID NO: 10859 - protein, 184 aa, Artificial Sequence
  Synthetic Polypeptide
HEGVHRKPSLLAHPGRLVKSEETVILQCWSDVMFEHFLLHREGMFNDTLRLIGEHHDGVSKANFSISRMKQDLAGTYRCYGSVTHSPYQLSAPSDPLDIVIIGLYEKPSLSAQPGPTVLAGENVTLSCSSRSSYDMYHLSREGEAHERRLPAGTKVNGTFQANFPLGPATHGGTYRCFGSFRDS

SEQ ID NO: 10860 - protein, 184 aa, Artificial Sequence
  Synthetic Polypeptide
HEGVHRKPSLLAHPGPLVKSEETVILQCWSDVRFEHFLLHREGKYKDTLHLIGEHHDGVSKANFSIGPMMQDLAGTYRCYGSVTHSPYQLSAPSDPLDIVITGLYEKPSLSAQPGPTVLAGESVTLSCSSRSSYDMYHLSREGEAHERRFSAGPKVNGTFQADFPLGPATHGGTYRCFGSFRDS

SEQ ID NO: 10861 - protein, 184 aa, Artificial Sequence
  Synthetic Polypeptide
HEGFRRKPSLLAHPGRLVKSEETVILQCWSDVMFEHFLLHREGTFNDTLRLIGEHIDGVSKANFSIGRMRQDLAGTYRCYGSVPHSPYQFSAPSDPLDIVITGLYEKPSLSAQPGPTVLAGESVTLSCSSWSSYDMYHLSTEGEAHERRFSAGPKVNGTFQADFPLGPATQGGTYRCFGSFHDS

SEQ ID NO: 10862 - protein, 184 aa, Artificial Sequence
  Synthetic Polypeptide
QEGVHRKPSFLALPGHLVKSEETVILQCWSDVMFEHFLLHREGKFNNTLHLIGEHHDGVSKANFSIGPMMPVLAGTYRCYGSVPHSPYQLSAPSDPLDMVIIGLYEKPSLSAQPGPTVQAGENVTLSCSSRSSYDMYHLSREGEAHERRLPAVRSINGTFQADFPLGPATHGGTYRCFGSFRDA

SEQ ID NO: 10863 - protein, 184 aa, Artificial Sequence
  Synthetic Polypeptide
HEGFRRKPSLLAHPGPLVKSEETVILQCWSDVMFEHFLLHREGTFNHTLRLIGEHIDGVSKGNFSIGRMTQDLAGTYRCYGSVTHSPYQLSAPSDPLDIVITGLYEKPSLSAQPGPTVLAGESVTLSCSSRSSYDMYHLSREGEAHERRLPAGPKVNRTFQADFPLDPATHGGTYRCFGSFRDS

SEQ ID NO: 10864 - protein, 282 aa, Artificial Sequence
  Synthetic Polypeptide
AGPHMGGQDKPFLSAWPSAVVPRGGHVTLRCHYRHRFNNFMLYKEDRIHVPIFHGRIFQEGFNMSPVTTAHAGNYTCRGSHPHSPTGWSAPSNPMVIMVTGNHRKPSLLAHPGPLVKSGERVILQCWSDIMFEHFFLHKEWISKDPSRLVGQIHDGVSKANFSIGSMMRALAGTYRCYGSVTHTPYQLSAPSDPLDIVVTGLYEKPSLSAQPGPKVQAGESVTLSCSSRSSYDMYHLSREGGAHERRLPAVRKVNRTFQADFPLGPATHGGTYRCFGSFRHS

SEQ ID NO: 10865 - protein, 193 aa, Artificial Sequence
  Synthetic Polypeptide
SLTNHTETITVEEGQTLTLKCVTSLRKNSSLQWLTPSGFTIFLNEYPALKNSKYQLLHHSANQLSITVPNVTLQDEGVYKCLHYSDSVSTKEVKVIVLATPFKPILEASVIRKQNGEEHVVLMCSTMRSKPPPQITWLLGNSMEVSGGTLHEFETDGKKCNTTSTLIIHTYGKNSTVDCIIRHRGLQGRKLVA

SEQ ID NO: 10866 - protein, 102 aa, Artificial Sequence
  Synthetic Polypeptide
MMTGTIETTGNISAEKGGSIILQCHLSSTTAQVTQVNWEQQDQLLAICNADLGWHISPSFKDRVAPGPGLGLTLQSLTVNDTGEYFCIYHTYPDGTYTGRIF

SEQ ID NO: 10867 - protein, 188 aa, Artificial Sequence
  Synthetic Polypeptide
QSSLTPLMVNGILGESVTLPLEFPAGEKVNFITWLFNETSLAFIVPHETKSPEIHVTNPKQGKRLNFTQSYSLQLSNLKMEDTGSYRAQISTKTSAKLSSYTLRILRQLRNIQVTNHSQLFQNMTCELHLTCSVEDADDNVSFRWEALGNTLSSQPNLTVSWDPRISSEQDYTCIAENAVSNLSFSVS

SEQ ID NO: 10868 - protein, 184 aa, Artificial Sequence
  Synthetic Polypeptide
SGPVKELVGSVGGAVTFPLKSKVKQVDSIVWTFNTTPLVTIQPEGGTIIVTQNRNRERVDFPDGGYSLKLSKLKKNDSGIYYVGIYSSSLQQPSTQEYVLHVYEHLSKPKVTMGLQSNKNGTCVTNLTCCMEHGEEDVIYTWKALGQAANESHNGSILPISWRWGESDMTFICVARNPVSRNFS

SEQ ID NO: 10869 - protein, 159 aa, Artificial Sequence
  Synthetic Polypeptide
ATPAPKSCPERHYWAQGKLCCQMCEPGTFLVKDCDQHRKAAQCDPCIPGVSFSPDHHTRPHCESCRHCNSGLLVRNCTITANAECACRNGWQCRDKECTECDPLPNPSLTARSSQALSPHPQPTHLPYVSEMLEARTAGHMQTLADFRQLPARTLSTHW

SEQ ID NO: 10870 - protein, 426 aa, Artificial Sequence
  Synthetic Polypeptide
GHLPKPTLWAEPGSVITQGSPVTLRCQGGQETQEYRLYREKKTAPWITRIPQELVKKGQFPIPSITWEHTGRYRCYYGSDTAGRSESSDPLELVVTGAYIKPTLSAQPSPVVNSGGNVTLQCDSQVAFDGFILCKEGEDEHPQCLNSQPHARGSSRAIFSVGPVSPSRRWWYRCYAYDSNSPYEWSLPSDLLELLVLGVSKKPSLSVQPGPIVAPEETLTLQCGSDAGYNRFVLYKDGERDFLQLAGAQPQAGLSQANFTLGPVSRSYGGQYRCYGAHNLSSEWSAPSDPLDILIAGQFYDRVSLSVQPGPTVASGENVTLLCQSQGWMQTFLLTKEGAADDPWRLRSTYQSQKYQAEFPMGPVTSAHAGTYRCYGSQSSKPYLLTHPSDPLELVVSGPSGGPSSPTTGPTSTSAGPEDQPLTPTG

SEQ ID NO: 10871 - protein, 96 aa, Artificial Sequence
  Synthetic Polypeptide
QEEDLPRPSISAEPGTVIPLGSHVTFVCRGPVGVQTFRLERDSRSTYNDTEDVSQASPSESEARFRIDSVREGNAGLYRCIYYKPPKWSEQSDYLE

SEQ ID NO: 10872 - protein, 120 aa, Artificial Sequence
  Synthetic Polypeptide
LQDPCSNCPAGTFCDNNRNQICSPCPPNSFSSAGGQRTCDICRQCKGVFRTRKECSSTSNAECDCTPGFHCLGAGCSMCEQDCKQGQELTKKGCKDCCFGTFNDQKRGICRPWTNCSLDG

SEQ ID NO: 10873 - protein, 94 aa, Artificial Sequence
  Synthetic Polypeptide
NKILVKQSPMLVAYDNAVNLSCKYSYNLFSREFRASLHKGLDSAVEVCVVYGNYSQQLQVYSKTGFNCDGKLGNESVTFYLQNLYVNQTDIYFC

SEQ ID NO: 10874 - protein, 138 aa, Artificial Sequence
  Synthetic Polypeptide
LHCVGDTYPSNDRCCHECRPGNGMVSRCSRSQNTVCRPCGPGFYNDVVSSKPCKPCTWCNLRSGSERKQLCTATQDTVCRCRAGTQPLDSYKPGVDCAPCPPGHFSPGDNQACKPWTNCTLAGKHTLQPASNSSDAIC

SEQ ID NO: 10875 - protein, 191 aa, Artificial Sequence
  Synthetic Polypeptide
KGCQGSADHVVSISGVPLQLQPNSIQTKVDSIAWKKLLPSQNGFHHILKWENGSLPSNTSNDRFSFIVKNLSLLIKAAQQQDSGLYCLEVTSISGKVQTATFQVFVFDKVEKPRLQGQGKILDRGRCQVALSCLVSRDGNVSYAWYRGSKLIQTAGNLTYLDEEVDINGTHTYTCNVSNPVSWESHTLNLT

SEQ ID NO: 10876 - protein, 171 aa, Artificial Sequence
  Synthetic Polypeptide
TPAAPPKAVLKLEPQWINVLQEDSVTLTCRGTHSPESDSIQWFHNGNLIPTHTQPSYRFKANNNDSGEYTCQTGQTSLSDPVHLTVLSEWLVLQTPHLEFQEGETIVLRCHSWKDKPLVKVTFFQNGKSKKFSRSDPNFSIPQANHSHSGDYHCTGNIGYTLYSSKPVTIT

SEQ ID NO: 10877 - protein, 263 aa, Artificial Sequence
  Synthetic Polypeptide
QVVDTTKAVITLQPPWVSVFQEETVTLHCEVLHLPGSSSTQWFLNGTATQTSTPSYRITSASVNDSGEYRCQRGLSGRSDPIQLEIHRGWLLLQVSSRVFTEGEPLALRCHAWKDKLVYNVLYYRNGKAFKFFHWNSNLTILKTNISHNGTYHCSGMGKHRYTSAGISVTVKELFPAPVLNASVTSPLLEGNLVTLSCETKLLLQRPGLQLYFSFYMGSKTLRGRNTSSEYQILTARREDSGLYWCEAATEDGNVLKRSPELE

SEQ ID NO: 10878 - protein, 9 aa, Artificial Sequence
  Synthetic Polypeptide
FLWGPRALV

SEQ ID NO: 10879 - protein, 9 aa, Artificial Sequence
  Synthetic Polypeptide
KVAELVHFL

SEQ ID NO: 10880 - protein, 9 aa, Artificial Sequence
  Synthetic Polypeptide
SLLMWITQC

SEQ ID NO: 10881 - protein, 11 aa, Artificial Sequence
  Synthetic Polypeptide
SLLMWITQCFL

SEQ ID NO: 10882 - protein, 10 aa, Artificial Sequence
  Synthetic Polypeptide
ESVDNYGISF

SEQ ID NO: 10883 - protein, 6 aa, Artificial Sequence
  Synthetic Polypeptide
QDIGNY

SEQ ID NO: 10884 - protein, 10 aa, Artificial Sequence
  Synthetic Polypeptide
ESVTILGSHL

SEQ ID NO: 10885 - protein, 6 aa, Artificial Sequence
  Synthetic Polypeptide
QDISNY

SEQ ID NO: 10886 - protein, 12 aa, Artificial Sequence
  Synthetic Polypeptide
QSLLNSGNQKNY

SEQ ID NO: 10887 - protein, 6 aa, Artificial Sequence
  Synthetic Polypeptide
QGINNY

SEQ ID NO: 10888 - protein, 6 aa, Artificial Sequence
  Synthetic Polypeptide
ENIYSN

SEQ ID NO: 10889 - protein, 5 aa, Artificial Sequence
  Synthetic Polypeptide
SSVSY

SEQ ID NO: 10890 - protein, 6 aa, Artificial Sequence
  Synthetic Polypeptide
QDISKY

SEQ ID NO: 10891 - protein, 6 aa, Artificial Sequence
  Synthetic Polypeptide
QDISKY

SEQ ID NO: 10892 - protein, 6 aa, Artificial Sequence
  Synthetic Polypeptide
QSVSSY

SEQ ID NO: 10893 - protein, 11 aa, Artificial Sequence
  Synthetic Polypeptide
KSLLHSNGITY

SEQ ID NO: 10894 - protein, 11 aa, Artificial Sequence
  Synthetic Polypeptide
QSIVHSVGNTF

SEQ ID NO: 10895 - protein, 6 aa, Artificial Sequence
  Synthetic Polypeptide
QSVGGY

SEQ ID NO: 10896 - protein, 6 aa, Artificial Sequence
  Synthetic Polypeptide
QGISSW

SEQ ID NO: 10897 - protein, 10 aa, Artificial Sequence
  Synthetic Polypeptide
QSVDFDGDSY

SEQ ID NO: 10898 - protein, 6 aa, Artificial Sequence
  Synthetic Polypeptide
QGISSW

SEQ ID NO: 10899 - protein, 11 aa, Artificial Sequence
  Synthetic Polypeptide
QSIVHSDGNTY

SEQ ID NO: 10900 - protein, 5 aa, Artificial Sequence
  Synthetic Polypeptide
SSVRY

SEQ ID NO: 10901 - protein, 12 aa, Artificial Sequence
  Synthetic Polypeptide
QSVFFSSSQKNY

SEQ ID NO: 10902 - protein, 12 aa, Artificial Sequence
  Synthetic Polypeptide
QSVLDSSKNKNS

SEQ ID NO: 10903 - protein, 11 aa, Artificial Sequence
  Synthetic Polypeptide
QTIVHSNGNTY

SEQ ID NO: 10904 - protein, 6 aa, Artificial Sequence
  Synthetic Polypeptide
QDISTY

SEQ ID NO: 10905 - protein, 6 aa, Artificial Sequence
  Synthetic Polypeptide
QDISTY

SEQ ID NO: 10906 - protein, 10 aa, Artificial Sequence
  Synthetic Polypeptide
KSVSTSGYSF

SEQ ID NO: 10907 - protein, 11 aa, Artificial Sequence
  Synthetic Polypeptide
QSLLDSDGKTY

SEQ ID NO: 10908 - protein, 10 aa, Artificial Sequence
  Synthetic Polypeptide
QSVDYEGDSF

SEQ ID NO: 10909 - protein, 12 aa, Artificial Sequence
  Synthetic Polypeptide
QSLLHSSNQKNY

SEQ ID NO: 10910 - protein, 7 aa, Artificial Sequence
  Synthetic Polypeptide
QSVSSSY

SEQ ID NO: 10911 - protein, 6 aa, Artificial Sequence
  Synthetic Polypeptide
QSISLW

SEQ ID NO: 10912 - protein, 6 aa, Artificial Sequence
  Synthetic Polypeptide
QSISSY

SEQ ID NO: 10913 - protein, 12 aa, Artificial Sequence
  Synthetic Polypeptide
QSLLNSRTRKNY

SEQ ID NO: 10914 - protein, 8 aa, Artificial Sequence
  Synthetic Polypeptide
QSVNNDVY

SEQ ID NO: 10915 - protein, 6 aa, Artificial Sequence
  Synthetic Polypeptide
QELSGY

SEQ ID NO: 10916 - protein, 10 aa, Artificial Sequence
  Synthetic Polypeptide
ESVDSYGNSF

SEQ ID NO: 10917 - protein, 6 aa, Artificial Sequence
  Synthetic Polypeptide
QDVGIA

SEQ ID NO: 10918 - protein, 6 aa, Artificial Sequence
  Synthetic Polypeptide
QDVITG

SEQ ID NO: 10919 - protein, 9 aa, Artificial Sequence
  Synthetic Polypeptide
GSNIGAPYD

SEQ ID NO: 10920 - protein, 11 aa, Artificial Sequence
  Synthetic Polypeptide
GSGSNIGAPYD

SEQ ID NO: 10921 - protein, 5 aa, Artificial Sequence
  Synthetic Polypeptide
SSVSY

SEQ ID NO: 10922 - protein, 6 aa, Artificial Sequence
  Synthetic Polypeptide
QSVSND

SEQ ID NO: 10923 - protein, 6 aa, Artificial Sequence
  Synthetic Polypeptide
QSIGTN

SEQ ID NO: 10924 - protein, 11 aa, Artificial Sequence
  Synthetic Polypeptide
QSLLDSDGKTY

SEQ ID NO: 10925 - protein, 6 aa, Artificial Sequence
  Synthetic Polypeptide
QSISSY

SEQ ID NO: 10926 - protein, 12 aa, Artificial Sequence
  Synthetic Polypeptide
QSLLNSGNQKNY

SEQ ID NO: 10927 - protein, 6 aa, Artificial Sequence
  Synthetic Polypeptide
QSISSY

SEQ ID NO: 10928 - protein, 6 aa, Artificial Sequence
  Synthetic Polypeptide
QGVGSD

SEQ ID NO: 10929 - protein, 10 aa, Artificial Sequence
  Synthetic Polypeptide
QSVSFAGTSL

SEQ ID NO: 10930 - protein, 11 aa, Artificial Sequence
  Synthetic Polypeptide
QSLVHRNGNTY

SEQ ID NO: 10931 - protein, 6 aa, Artificial Sequence
  Synthetic Polypeptide
QSVSND

SEQ ID NO: 10932 - protein, 6 aa, Artificial Sequence
  Synthetic Polypeptide
QDISNY

SEQ ID NO: 10933 - protein, 7 aa, Artificial Sequence
  Synthetic Polypeptide
SAHKTYT

SEQ ID NO: 10934 - protein, 6 aa, Artificial Sequence
  Synthetic Polypeptide
QGISSW

SEQ ID NO: 10935 - protein, 8 aa, Artificial Sequence
  Synthetic Polypeptide
NSNIERNY

SEQ ID NO: 10936 - protein, 8 aa, Artificial Sequence
  Synthetic Polypeptide
RSNVGGNY

SEQ ID NO: 10937 - protein, 6 aa, Artificial Sequence
  Synthetic Polypeptide
QDVNTA

SEQ ID NO: 10938 - protein, 4 aa, Artificial Sequence
  Synthetic Polypeptide
SNNF

SEQ ID NO: 10939 - protein, 7 aa, Artificial Sequence
  Synthetic Polypeptide
QSVSSGS

SEQ ID NO: 10940 - protein, 6 aa, Artificial Sequence
  Synthetic Polypeptide
QDINNY

SEQ ID NO: 10941 - protein, 7 aa, Artificial Sequence
  Synthetic Polypeptide
LSVSSTY

SEQ ID NO: 10942 - protein, 6 aa, Artificial Sequence
  Synthetic Polypeptide
QDVGTA

SEQ ID NO: 10943 - protein, 6 aa, Artificial Sequence
  Synthetic Polypeptide
QDISNY

SEQ ID NO: 10944 - protein, 6 aa, Artificial Sequence
  Synthetic Polypeptide
QDIDRY

SEQ ID NO: 10945 - protein, 7 aa, Artificial Sequence
  Synthetic Polypeptide
SGNIHNY

SEQ ID NO: 10946 - protein, 6 aa, Artificial Sequence
  Synthetic Polypeptide
VNIYSY

SEQ ID NO: 10947 - protein, 6 aa, Artificial Sequence
  Synthetic Polypeptide
QNVGNN

SEQ ID NO: 10948 - protein, 6 aa, Artificial Sequence
  Synthetic Polypeptide
EDIYIR

SEQ ID NO: 10949 - protein, 6 aa, Artificial Sequence
  Synthetic Polypeptide
EDIYIR

SEQ ID NO: 10950 - protein, 6 aa, Artificial Sequence
  Synthetic Polypeptide
EDIYIR

SEQ ID NO: 10951 - protein, 5 aa, Artificial Sequence
  Synthetic Polypeptide
SSVSY

SEQ ID NO: 10952 - protein, 6 aa, Artificial Sequence
  Synthetic Polypeptide
QSISSY

SEQ ID NO: 10953 - protein, 11 aa, Artificial Sequence
  Synthetic Polypeptide
QRLVHSNGNTY

SEQ ID NO: 10954 - protein, 6 aa, Artificial Sequence
  Synthetic Polypeptide
QLGGKY

SEQ ID NO: 10955 - protein, 8 aa, Artificial Sequence
  Synthetic Polypeptide
SGSIASKY

SEQ ID NO: 10956 - protein, 6 aa, Artificial Sequence
  Synthetic Polypeptide
QNINVW

SEQ ID NO: 10957 - protein, 6 aa, Artificial Sequence
  Synthetic Polypeptide
QNIGTS

SEQ ID NO: 10958 - protein, 12 aa, Artificial Sequence
  Synthetic Polypeptide
QSLLNSGDQKNY

SEQ ID NO: 10959 - protein, 6 aa, Artificial Sequence
  Synthetic Polypeptide
QDVSIA

SEQ ID NO: 10960 - protein, 8 aa, Artificial Sequence
  Synthetic Polypeptide
SSNIGSNT

SEQ ID NO: 10961 - protein, 6 aa, Artificial Sequence
  Synthetic Polypeptide
QNINKW

SEQ ID NO: 10962 - protein, 6 aa, Artificial Sequence
  Synthetic Polypeptide
NIGSKS

SEQ ID NO: 10963 - protein, 11 aa, Artificial Sequence
  Synthetic Polypeptide
SESVDNYGNTF

SEQ ID NO: 10964 - protein, 7 aa, Artificial Sequence
  Synthetic Polypeptide
QSVSNTY

SEQ ID NO: 10965 - protein, 6 aa, Artificial Sequence
  Synthetic Polypeptide
SLRSNY

SEQ ID NO: 10966 - protein, 5 aa, Artificial Sequence
  Synthetic Polypeptide
SSISY

SEQ ID NO: 10967 - protein, 6 aa, Artificial Sequence
  Synthetic Polypeptide
QGFNKY

SEQ ID NO: 10968 - protein, 6 aa, Artificial Sequence
  Synthetic Polypeptide
QDIRYY

SEQ ID NO: 10969 - protein, 6 aa, Artificial Sequence
  Synthetic Polypeptide
QSVSRN

SEQ ID NO: 10970 - protein, 6 aa, Artificial Sequence
  Synthetic Polypeptide
KNIRSY

SEQ ID NO: 10971 - protein, 9 aa, Artificial Sequence
  Synthetic Polypeptide
SSSNIGNNY

SEQ ID NO: 10972 - protein, 9 aa, Artificial Sequence
  Synthetic Polypeptide
SSNIGAGYD

SEQ ID NO: 10973 - protein, 8 aa, Artificial Sequence
  Synthetic Polypeptide
SSNIGSNS

SEQ ID NO: 10974 - protein, 11 aa, Artificial Sequence
  Synthetic Polypeptide
SESVSVIGAHL

SEQ ID NO: 10975 - protein, 10 aa, Artificial Sequence
  Synthetic Polypeptide
ESVTILGSHL

SEQ ID NO: 10976 - protein, 12 aa, Artificial Sequence
  Synthetic Polypeptide
QSLLNSGNQKNY

SEQ ID NO: 10977 - protein, 12 aa, Artificial Sequence
  Synthetic Polypeptide
QSLLNSGNQKNY

SEQ ID NO: 10978 - protein, 7 aa, Artificial Sequence
  Synthetic Polypeptide
SKSISKD

SEQ ID NO: 10979 - protein, 5 aa, Artificial Sequence
  Synthetic Polypeptide
SSINY

SEQ ID NO: 10980 - protein, 12 aa, Artificial Sequence
  Synthetic Polypeptide
QSFLSSGDGKNY

SEQ ID NO: 10981 - protein, 11 aa, Artificial Sequence
  Synthetic Polypeptide
QSLVHSDGDTY

SEQ ID NO: 10982 - protein, 10 aa, Artificial Sequence
  Synthetic Polypeptide
ESVDTFGISF

SEQ ID NO: 10983 - protein, 6 aa, Artificial Sequence
  Synthetic Polypeptide
QGISSA

SEQ ID NO: 10984 - protein, 11 aa, Artificial Sequence
  Synthetic Polypeptide
KSLQNVNGNTY

SEQ ID NO: 10985 - protein, 6 aa, Artificial Sequence
  Synthetic Polypeptide
DHINNW

SEQ ID NO: 10986 - protein, 5 aa, Artificial Sequence
  Synthetic Polypeptide
SSVSY

SEQ ID NO: 10987 - protein, 6 aa, Artificial Sequence
  Synthetic Polypeptide
QSVSSY

SEQ ID NO: 10988 - protein, 6 aa, Artificial Sequence
  Synthetic Polypeptide
QDINSY

SEQ ID NO: 10989 - protein, 11 aa, Artificial Sequence
  Synthetic Polypeptide
QSLLDGDGKTY

SEQ ID NO: 10990 - protein, 6 aa, Artificial Sequence
  Synthetic Polypeptide
QDVSTA

SEQ ID NO: 10991 - protein, 10 aa, Artificial Sequence
  Synthetic Polypeptide
QSVSTSSYNY

SEQ ID NO: 10992 - protein, 7 aa, Artificial Sequence
  Synthetic Polypeptide
SNVISSY

SEQ ID NO: 10993 - protein, 7 aa, Artificial Sequence
  Synthetic Polypeptide
SNVISSY

SEQ ID NO: 10994 - protein, 11 aa, Artificial Sequence
  Synthetic Polypeptide
QSLVHSNGNTY

SEQ ID NO: 10995 - protein, 8 aa, Artificial Sequence
  Synthetic Polypeptide
TSNIGNNY

SEQ ID NO: 10996 - protein, 9 aa, Artificial Sequence
  Synthetic Polypeptide
SSNIGAGYD

SEQ ID NO: 10997 - protein, 9 aa, Artificial Sequence
  Synthetic Polypeptide
SSDVGGYNY

SEQ ID NO: 10998 - protein, 6 aa, Artificial Sequence
  Synthetic Polypeptide
LDISHY

SEQ ID NO: 10999 - protein, 11 aa, Artificial Sequence
  Synthetic Polypeptide
QSILHSTGDTY

SEQ ID NO: 11000 - protein, 6 aa, Artificial Sequence
  Synthetic Polypeptide
NIGSKS

SEQ ID NO: 11001 - protein, 10 aa, Artificial Sequence
  Synthetic Polypeptide
ESVDSYGKSF

SEQ ID NO: 11002 - protein, 10 aa, Artificial Sequence
  Synthetic Polypeptide
ESVTILGSHL

SEQ ID NO: 11003 - protein, 9 aa, Artificial Sequence
  Synthetic Polypeptide
ESVTILGSH

SEQ ID NO: 11004 - protein, 6 aa, Artificial Sequence
  Synthetic Polypeptide
EDIYIR

SEQ ID NO: 11005 - protein, 6 aa, Artificial Sequence
  Synthetic Polypeptide
SLRSYY

SEQ ID NO: 11006 - protein, 9 aa, Artificial Sequence
  Synthetic Polypeptide
SSDVGGYNY

SEQ ID NO: 11007 - protein, 9 aa, Artificial Sequence
  Synthetic Polypeptide
SSDVGGYNY

SEQ ID NO: 11008 - protein, 9 aa, Artificial Sequence
  Synthetic Polypeptide
SSDVGGYNY

SEQ ID NO: 11009 - protein, 9 aa, Artificial Sequence
  Synthetic Polypeptide
SSDVGGYNY

SEQ ID NO: 11010 - protein, 5 aa, Artificial Sequence
  Synthetic Polypeptide
SSVSY

SEQ ID NO: 11011 - protein, 6 aa, Artificial Sequence
  Synthetic Polypeptide
EDIYIR

SEQ ID NO: 11012 - protein, 6 aa, Artificial Sequence
  Synthetic Polypeptide
QGISTD

SEQ ID NO: 11013 - protein, 6 aa, Artificial Sequence
  Synthetic Polypeptide
LGISTW

SEQ ID NO: 11014 - protein, 11 aa, Artificial Sequence
  Synthetic Polypeptide
RASQDISNYLN

SEQ ID NO: 11015 - protein, 17 aa, Artificial Sequence
  Synthetic Polypeptide
KSSQSLLYRSNQKNYLA

SEQ ID NO: 11016 - protein, 16 aa, Artificial Sequence
  Synthetic Polypeptide
RSSQSLLHSSGNTYLE

SEQ ID NO: 11017 - protein, 11 aa, Artificial Sequence
  Synthetic Polypeptide
RASENIYSNLA

SEQ ID NO: 11018 - protein, 16 aa, Artificial Sequence
  Synthetic Polypeptide
RSSQSIVHSNGNTYLE

SEQ ID NO: 11019 - protein, 10 aa, Artificial Sequence
  Synthetic Polypeptide
SARSSISFMY

SEQ ID NO: 11020 - protein, 12 aa, Artificial Sequence
  Synthetic Polypeptide
TLSSGHKTDTID

SEQ ID NO: 11021 - protein, 15 aa, Artificial Sequence
  Synthetic Polypeptide
RASESVTILGSHLIH

SEQ ID NO: 11022 - protein, 11 aa, Artificial Sequence
  Synthetic Polypeptide
QASQDINNFLN

SEQ ID NO: 11023 - protein, 11 aa, Artificial Sequence
  Synthetic Polypeptide
QASQDINNFLN

SEQ ID NO: 11024 - protein, 11 aa, Artificial Sequence
  Synthetic Polypeptide
RASQGIRNDLG

SEQ ID NO: 11025 - protein, 12 aa, Artificial Sequence
  Synthetic Polypeptide
RASQSVSSSFLA

SEQ ID NO: 11026 - protein, 11 aa, Artificial Sequence
  Synthetic Polypeptide
RASQGISSYLA

SEQ ID NO: 11027 - protein, 14 aa, Artificial Sequence
  Synthetic Polypeptide
TGTSSDVGDYNYVS

SEQ ID NO: 11028 - protein, 11 aa, Artificial Sequence
  Synthetic Polypeptide
SASQGINNYLN

SEQ ID NO: 11029 - protein, 17 aa, Artificial Sequence
  Synthetic Polypeptide
KSSQSVLYSSNQKNYLA

SEQ ID NO: 11030 - protein, 11 aa, Artificial Sequence
  Synthetic Polypeptide
RASQDISNYLN

SEQ ID NO: 11031 - protein, 12 aa, Artificial Sequence
  Synthetic Polypeptide
TASSRVSSSYLH

SEQ ID NO: 11032 - protein, 10 aa, Artificial Sequence
  Synthetic Polypeptide
SASSSVTYMY

SEQ ID NO: 11033 - protein, 11 aa, Artificial Sequence
  Synthetic Polypeptide
RASENIYSYLA

SEQ ID NO: 11034 - protein, 10 aa, Artificial Sequence
  Synthetic Polypeptide
SASSSVSYMH

SEQ ID NO: 11035 - protein, 11 aa, Artificial Sequence
  Synthetic Polypeptide
KASDHINNWLA

SEQ ID NO: 11036 - protein, 12 aa, Artificial Sequence
  Synthetic Polypeptide
RAGQSVRSSYLG

SEQ ID NO: 11037 - protein, 15 aa, Artificial Sequence
  Synthetic Polypeptide
RASESVTILGSHLIH

SEQ ID NO: 11038 - protein, 11 aa, Artificial Sequence
  Synthetic Polypeptide
RASQSVSSYLA

SEQ ID NO: 11039 - protein, 12 aa, Artificial Sequence
  Synthetic Polypeptide
RASQSVSSSYLA

SEQ ID NO: 11040 - protein, 12 aa, Artificial Sequence
  Synthetic Polypeptide
RASQSVSSDYLA

SEQ ID NO: 11041 - protein, 11 aa, Artificial Sequence
  Synthetic Polypeptide
RASQDVNTAVA

SEQ ID NO: 11042 - protein, 11 aa, Artificial Sequence
  Synthetic Polypeptide
RASQGITRWLA

SEQ ID NO: 11043 - protein, 11 aa, Artificial Sequence
  Synthetic Polypeptide
RASQDISRWLA

SEQ ID NO: 11044 - protein, 16 aa, Artificial Sequence
  Synthetic Polypeptide
RSSQSLVHSDGNTYLS

SEQ ID NO: 11045 - protein, 11 aa, Artificial Sequence
  Synthetic Polypeptide
WASQGINNYLA

SEQ ID NO: 11046 - protein, 12 aa, Artificial Sequence
  Synthetic Polypeptide
RASQSVNKNYLA

SEQ ID NO: 11047 - protein, 16 aa, Artificial Sequence
  Synthetic Polypeptide
RSSQSLVYRDGNTYLS

SEQ ID NO: 11048 - protein, 11 aa, Artificial Sequence
  Synthetic Polypeptide
KASQSVNNDVS

SEQ ID NO: 11049 - protein, 11 aa, Artificial Sequence
  Synthetic Polypeptide
RASQSINNYLN

SEQ ID NO: 11050 - protein, 11 aa, Artificial Sequence
  Synthetic Polypeptide
SGDKLGDKYAS

SEQ ID NO: 11051 - protein, 11 aa, Artificial Sequence
  Synthetic Polypeptide
RASQSISSYLN

SEQ ID NO: 11052 - protein, 15 aa, Artificial Sequence
  Synthetic Polypeptide
RASKSVSTSGYTYMH

SEQ ID NO: 11053 - protein, 11 aa, Artificial Sequence
  Synthetic Polypeptide
SASQGIRNYLN

SEQ ID NO: 11054 - protein, 15 aa, Artificial Sequence
  Synthetic Polypeptide
RAGESVDIFGVGFLH

SEQ ID NO: 11055 - protein, 11 aa, Artificial Sequence
  Synthetic Polypeptide
RASQNIVFNLA

SEQ ID NO: 11056 - protein, 14 aa, Artificial Sequence
  Synthetic Polypeptide
GSSTGAVTTSNYAN

SEQ ID NO: 11057 - protein, 12 aa, Artificial Sequence
  Synthetic Polypeptide
RASQSVSSSYLA

SEQ ID NO: 11058 - protein, 12 aa, Artificial Sequence
  Synthetic Polypeptide
SVSSSISSSNLH

SEQ ID NO: 11059 - protein, 11 aa, Artificial Sequence
  Synthetic Polypeptide
KAGQNVGTSVA

SEQ ID NO: 11060 - protein, 11 aa, Artificial Sequence
  Synthetic Polypeptide
SASQDIGNFLN

SEQ ID NO: 11061 - protein, 11 aa, Artificial Sequence
  Synthetic Polypeptide
QSLANSYGNTF

SEQ ID NO: 11062 - protein, 6 aa, Artificial Sequence
  Synthetic Polypeptide
QDISNY

SEQ ID NO: 11063 - protein, 6 aa, Artificial Sequence
  Synthetic Polypeptide
QSVDSN

SEQ ID NO: 11064 - protein, 6 aa, Artificial Sequence
  Synthetic Polypeptide
QDISNY

SEQ ID NO: 11065 - protein, 6 aa, Artificial Sequence
  Synthetic Polypeptide
DHINNW

SEQ ID NO: 11066 - protein, 6 aa, Artificial Sequence
  Synthetic Polypeptide
NIGSKS

SEQ ID NO: 11067 - protein, 6 aa, Artificial Sequence
  Synthetic Polypeptide
EDIYIR

SEQ ID NO: 11068 - protein, 6 aa, Artificial Sequence
  Synthetic Polypeptide
ESVDNY

SEQ ID NO: 11069 - protein, 10 aa, Artificial Sequence
  Synthetic Polypeptide
KSVSTSGYSY

SEQ ID NO: 11070 - protein, 7 aa, Artificial Sequence
  Synthetic Polypeptide
QFISSSY

SEQ ID NO: 11071 - protein, 11 aa, Artificial Sequence
  Synthetic Polypeptide
GGNNIGSKSVH

SEQ ID NO: 11072 - protein, 11 aa, Artificial Sequence
  Synthetic Polypeptide
GGNNIGSKSVH

SEQ ID NO: 11073 - protein, 11 aa, Artificial Sequence
  Synthetic Polypeptide
GGNNIGSKSVH

SEQ ID NO: 11074 - protein, 11 aa, Artificial Sequence
  Synthetic Polypeptide
GGNNIGSKSVH

SEQ ID NO: 11075 - protein, 11 aa, Artificial Sequence
  Synthetic Polypeptide
GGNNIGSKSVH

SEQ ID NO: 11076 - protein, 11 aa, Artificial Sequence
  Synthetic Polypeptide
GGNNIGSKSVH

SEQ ID NO: 11077 - protein, 7 aa, Artificial Sequence
  Synthetic Polypeptide
NNIGSKS

SEQ ID NO: 11078 - protein, 7 aa, Artificial Sequence
  Synthetic Polypeptide
KNIGSKS

SEQ ID NO: 11079 - protein, 7 aa, Artificial Sequence
  Synthetic Polypeptide
NNLGSKS

SEQ ID NO: 11080 - protein, 7 aa, Artificial Sequence
  Synthetic Polypeptide
NNIGGKS

SEQ ID NO: 11081 - protein, 7 aa, Artificial Sequence
  Synthetic Polypeptide
NNIGSKT

SEQ ID NO: 11082 - protein, 7 aa, Artificial Sequence
  Synthetic Polypeptide
KNIGSKS

SEQ ID NO: 11083 - protein, 7 aa, Artificial Sequence
  Synthetic Polypeptide
NNLGSKS

SEQ ID NO: 11084 - protein, 7 aa, Artificial Sequence
  Synthetic Polypeptide
NNIGGKS

SEQ ID NO: 11085 - protein, 11 aa, Artificial Sequence
  Synthetic Polypeptide
RASQSVSSYLA

SEQ ID NO: 11086 - protein, 15 aa, Artificial Sequence
  Synthetic Polypeptide
KSSQSVLYSSNNKNY

SEQ ID NO: 11087 - protein, 11 aa, Artificial Sequence
  Synthetic Polypeptide
RASQSINKWLN

SEQ ID NO: 11088 - protein, 10 aa, Artificial Sequence
  Synthetic Polypeptide
RASSSVSYIH

SEQ ID NO: 11089 - protein, 11 aa, Artificial Sequence
  Synthetic Polypeptide
KASQDVYNAVA

SEQ ID NO: 11090 - protein, 11 aa, Artificial Sequence
  Synthetic Polypeptide
KASQDVGTSVA

SEQ ID NO: 11091 - protein, 5 aa, Artificial Sequence
  Synthetic Polypeptide
SSVSY

SEQ ID NO: 11092 - protein, 6 aa, Artificial Sequence
  Synthetic Polypeptide
QDVNTA

SEQ ID NO: 11093 - protein, 7 aa, Artificial Sequence
  Synthetic Polypeptide
QSVSSDY

SEQ ID NO: 11094 - protein, 6 aa, Artificial Sequence
  Synthetic Polypeptide
ELPKRY

SEQ ID NO: 11095 - protein, 6 aa, Artificial Sequence
  Synthetic Polypeptide
QNVGTN

SEQ ID NO: 11096 - protein, 6 aa, Artificial Sequence
  Synthetic Polypeptide
QSVSSY

SEQ ID NO: 11097 - protein, 9 aa, Artificial Sequence
  Synthetic Polypeptide
SSDVGSYNY

SEQ ID NO: 11098 - protein, 6 aa, Artificial Sequence
  Synthetic Polypeptide
QSVSSY

SEQ ID NO: 11099 - protein, 6 aa, Artificial Sequence
  Synthetic Polypeptide
QSISSY

SEQ ID NO: 11100 - protein, 6 aa, Artificial Sequence
  Synthetic Polypeptide
ESVSTR

SEQ ID NO: 11101 - protein, 12 aa, Artificial Sequence
  Synthetic Polypeptide
QSLLSSRHQKNF

SEQ ID NO: 11102 - protein, 6 aa, Artificial Sequence
  Synthetic Polypeptide
QDISSY

SEQ ID NO: 11103 - protein, 6 aa, Artificial Sequence
  Synthetic Polypeptide
QSISSH

SEQ ID NO: 11104 - protein, 6 aa, Artificial Sequence
  Synthetic Polypeptide
QDVGTA

SEQ ID NO: 11105 - protein, 6 aa, Artificial Sequence
  Synthetic Polypeptide
QDVGTA

SEQ ID NO: 11106 - protein, 6 aa, Artificial Sequence
  Synthetic Polypeptide
QDVGTA

SEQ ID NO: 11107 - protein, 6 aa, Artificial Sequence
  Synthetic Polypeptide
QDVGTA

SEQ ID NO: 11108 - protein, 6 aa, Artificial Sequence
  Synthetic Polypeptide
QDVGTA

SEQ ID NO: 11109 - protein, 5 aa, Artificial Sequence
  Synthetic Polypeptide
SSVSY

SEQ ID NO: 11110 - protein, 5 aa, Artificial Sequence
  Synthetic Polypeptide
SSVSY

SEQ ID NO: 11111 - protein, 10 aa, Artificial Sequence
  Synthetic Polypeptide
KSVSTSGYSY

SEQ ID NO: 11112 - protein, 6 aa, Artificial Sequence
  Synthetic Polypeptide
QNVRTV

SEQ ID NO: 11113 - protein, 11 aa, Artificial Sequence
  Synthetic Polypeptide
QSLLYSSNQKN

SEQ ID NO: 11114 - protein, 11 aa, Artificial Sequence
  Synthetic Polypeptide
QSVLYSSNQKN

SEQ ID NO: 11115 - protein, 11 aa, Artificial Sequence
  Synthetic Polypeptide
QSLLYSSNQKN

SEQ ID NO: 11116 - protein, 11 aa, Artificial Sequence
  Synthetic Polypeptide
RASQDISNYLN

SEQ ID NO: 11117 - protein, 11 aa, Artificial Sequence
  Synthetic Polypeptide
RASQDISSYLN

SEQ ID NO: 11118 - protein, 11 aa, Artificial Sequence
  Synthetic Polypeptide
RASQDISNYLN

SEQ ID NO: 11119 - protein, 4 aa, Artificial Sequence
  Synthetic Polypeptide
RASN

SEQ ID NO: 11120 - protein, 4 aa, Artificial Sequence
  Synthetic Polypeptide
YTSR

SEQ ID NO: 11121 - protein, 4 aa, Artificial Sequence
  Synthetic Polypeptide
LASN

SEQ ID NO: 11122 - protein, 4 aa, Artificial Sequence
  Synthetic Polypeptide
YTSN

SEQ ID NO: 11123 - protein, 4 aa, Artificial Sequence
  Synthetic Polypeptide
WAST

SEQ ID NO: 11124 - protein, 4 aa, Artificial Sequence
  Synthetic Polypeptide
YTST

SEQ ID NO: 11125 - protein, 4 aa, Artificial Sequence
  Synthetic Polypeptide
AATN

SEQ ID NO: 11126 - protein, 4 aa, Artificial Sequence
  Synthetic Polypeptide
DTSK

SEQ ID NO: 11127 - protein, 4 aa, Artificial Sequence
  Synthetic Polypeptide
HTSR

SEQ ID NO: 11128 - protein, 4 aa, Artificial Sequence
  Synthetic Polypeptide
HTSR

SEQ ID NO: 11129 - protein, 4 aa, Artificial Sequence
  Synthetic Polypeptide
DASN

SEQ ID NO: 11130 - protein, 4 aa, Artificial Sequence
  Synthetic Polypeptide
QMSN

SEQ ID NO: 11131 - protein, 4 aa, Artificial Sequence
  Synthetic Polypeptide
KVSN

SEQ ID NO: 11132 - protein, 4 aa, Artificial Sequence
  Synthetic Polypeptide
DASN

SEQ ID NO: 11133 - protein, 4 aa, Artificial Sequence
  Synthetic Polypeptide
AASS

SEQ ID NO: 11134 - protein, 4 aa, Artificial Sequence
  Synthetic Polypeptide
AAST

SEQ ID NO: 11135 - protein, 4 aa, Artificial Sequence
  Synthetic Polypeptide
AASS

SEQ ID NO: 11136 - protein, 4 aa, Artificial Sequence
  Synthetic Polypeptide
KVSN

SEQ ID NO: 11137 - protein, 4 aa, Artificial Sequence
  Synthetic Polypeptide
LTSN

SEQ ID NO: 11138 - protein, 4 aa, Artificial Sequence
  Synthetic Polypeptide
WAST

SEQ ID NO: 11139 - protein, 4 aa, Artificial Sequence
  Synthetic Polypeptide
WAST

SEQ ID NO: 11140 - protein, 4 aa, Artificial Sequence
  Synthetic Polypeptide
QVSN

SEQ ID NO: 11141 - protein, 4 aa, Artificial Sequence
  Synthetic Polypeptide
YTSR

SEQ ID NO: 11142 - protein, 4 aa, Artificial Sequence
  Synthetic Polypeptide
YTSR

SEQ ID NO: 11143 - protein, 4 aa, Artificial Sequence
  Synthetic Polypeptide
LASN

SEQ ID NO: 11144 - protein, 4 aa, Artificial Sequence
  Synthetic Polypeptide
LVSK

SEQ ID NO: 11145 - protein, 4 aa, Artificial Sequence
  Synthetic Polypeptide
AASN

SEQ ID NO: 11146 - protein, 4 aa, Artificial Sequence
  Synthetic Polypeptide
WAST

SEQ ID NO: 11147 - protein, 4 aa, Artificial Sequence
  Synthetic Polypeptide
GTSS

SEQ ID NO: 11148 - protein, 4 aa, Artificial Sequence
  Synthetic Polypeptide
AAST

SEQ ID NO: 11149 - protein, 4 aa, Artificial Sequence
  Synthetic Polypeptide
AVST

SEQ ID NO: 11150 - protein, 4 aa, Artificial Sequence
  Synthetic Polypeptide
WAST

SEQ ID NO: 11151 - protein, 4 aa, Artificial Sequence
  Synthetic Polypeptide
WAST

SEQ ID NO: 11152 - protein, 4 aa, Artificial Sequence
  Synthetic Polypeptide
AAST

SEQ ID NO: 11153 - protein, 4 aa, Artificial Sequence
  Synthetic Polypeptide
LASN

SEQ ID NO: 11154 - protein, 4 aa, Artificial Sequence
  Synthetic Polypeptide
WAST

SEQ ID NO: 11155 - protein, 4 aa, Artificial Sequence
  Synthetic Polypeptide
SASY

SEQ ID NO: 11156 - protein, 4 aa, Artificial Sequence
  Synthetic Polypeptide
HNNK

SEQ ID NO: 11157 - protein, 4 aa, Artificial Sequence
  Synthetic Polypeptide
HNNK

SEQ ID NO: 11158 - protein, 4 aa, Artificial Sequence
  Synthetic Polypeptide
LTSN

SEQ ID NO: 11159 - protein, 4 aa, Artificial Sequence
  Synthetic Polypeptide
YASN

SEQ ID NO: 11160 - protein, 4 aa, Artificial Sequence
  Synthetic Polypeptide
YASE

SEQ ID NO: 11161 - protein, 4 aa, Artificial Sequence
  Synthetic Polypeptide
LVSK

SEQ ID NO: 11162 - protein, 4 aa, Artificial Sequence
  Synthetic Polypeptide
WAST

SEQ ID NO: 11163 - protein, 4 aa, Artificial Sequence
  Synthetic Polypeptide
WAST

SEQ ID NO: 11164 - protein, 4 aa, Artificial Sequence
  Synthetic Polypeptide
AASS

SEQ ID NO: 11165 - protein, 4 aa, Artificial Sequence
  Synthetic Polypeptide
HASS

SEQ ID NO: 11166 - protein, 4 aa, Artificial Sequence
  Synthetic Polypeptide
RASN

SEQ ID NO: 11167 - protein, 4 aa, Artificial Sequence
  Synthetic Polypeptide
KVSN

SEQ ID NO: 11168 - protein, 4 aa, Artificial Sequence
  Synthetic Polypeptide
SASN

SEQ ID NO: 11169 - protein, 4 aa, Artificial Sequence
  Synthetic Polypeptide
YSSN

SEQ ID NO: 11170 - protein, 7 aa, Artificial Sequence
  Synthetic Polypeptide
VKSDGSY

SEQ ID NO: 11171 - protein, 4 aa, Artificial Sequence
  Synthetic Polypeptide
AASS

SEQ ID NO: 11172 - protein, 4 aa, Artificial Sequence
  Synthetic Polypeptide
DNDR

SEQ ID NO: 11173 - protein, 4 aa, Artificial Sequence
  Synthetic Polypeptide
RSNQ

SEQ ID NO: 11174 - protein, 4 aa, Artificial Sequence
  Synthetic Polypeptide
SASF

SEQ ID NO: 11175 - protein, 4 aa, Artificial Sequence
  Synthetic Polypeptide
DVNK

SEQ ID NO: 11176 - protein, 4 aa, Artificial Sequence
  Synthetic Polypeptide
GAST

SEQ ID NO: 11177 - protein, 4 aa, Artificial Sequence
  Synthetic Polypeptide
DASN

SEQ ID NO: 11178 - protein, 4 aa, Artificial Sequence
  Synthetic Polypeptide
STSN

SEQ ID NO: 11179 - protein, 4 aa, Artificial Sequence
  Synthetic Polypeptide
SASY

SEQ ID NO: 11180 - protein, 4 aa, Artificial Sequence
  Synthetic Polypeptide
YTSR

SEQ ID NO: 11181 - protein, 4 aa, Artificial Sequence
  Synthetic Polypeptide
DTST

SEQ ID NO: 11182 - protein, 4 aa, Artificial Sequence
  Synthetic Polypeptide
NAKT

SEQ ID NO: 11183 - protein, 4 aa, Artificial Sequence
  Synthetic Polypeptide
NAKI

SEQ ID NO: 11184 - protein, 4 aa, Artificial Sequence
  Synthetic Polypeptide
SASY

SEQ ID NO: 11185 - protein, 4 aa, Artificial Sequence
  Synthetic Polypeptide
AATS

SEQ ID NO: 11186 - protein, 4 aa, Artificial Sequence
  Synthetic Polypeptide
AATS

SEQ ID NO: 11187 - protein, 4 aa, Artificial Sequence
  Synthetic Polypeptide
AATS

SEQ ID NO: 11188 - protein, 4 aa, Artificial Sequence
  Synthetic Polypeptide
RTSN

SEQ ID NO: 11189 - protein, 4 aa, Artificial Sequence
  Synthetic Polypeptide
DASN

SEQ ID NO: 11190 - protein, 4 aa, Artificial Sequence
  Synthetic Polypeptide
RVSN

SEQ ID NO: 11191 - protein, 4 aa, Artificial Sequence
  Synthetic Polypeptide
QDRK

SEQ ID NO: 11192 - protein, 4 aa, Artificial Sequence
  Synthetic Polypeptide
EDNQ

SEQ ID NO: 11193 - protein, 4 aa, Artificial Sequence
  Synthetic Polypeptide
KASN

SEQ ID NO: 11194 - protein, 4 aa, Artificial Sequence
  Synthetic Polypeptide
YASE

SEQ ID NO: 11195 - protein, 4 aa, Artificial Sequence
  Synthetic Polypeptide
WAST

SEQ ID NO: 11196 - protein, 4 aa, Artificial Sequence
  Synthetic Polypeptide
SASY

SEQ ID NO: 11197 - protein, 4 aa, Artificial Sequence
  Synthetic Polypeptide
SNNQ

SEQ ID NO: 11198 - protein, 4 aa, Artificial Sequence
  Synthetic Polypeptide
KASS

SEQ ID NO: 11199 - protein, 4 aa, Artificial Sequence
  Synthetic Polypeptide
DDSD

SEQ ID NO: 11200 - protein, 4 aa, Artificial Sequence
  Synthetic Polypeptide
RASN

SEQ ID NO: 11201 - protein, 4 aa, Artificial Sequence
  Synthetic Polypeptide
GASS

SEQ ID NO: 11202 - protein, 4 aa, Artificial Sequence
  Synthetic Polypeptide
GQNN

SEQ ID NO: 11203 - protein, 4 aa, Artificial Sequence
  Synthetic Polypeptide
DTSK

SEQ ID NO: 11204 - protein, 4 aa, Artificial Sequence
  Synthetic Polypeptide
YTST

SEQ ID NO: 11205 - protein, 4 aa, Artificial Sequence
  Synthetic Polypeptide
VASS

SEQ ID NO: 11206 - protein, 4 aa, Artificial Sequence
  Synthetic Polypeptide
GAST

SEQ ID NO: 11207 - protein, 4 aa, Artificial Sequence
  Synthetic Polypeptide
SGST

SEQ ID NO: 11208 - protein, 4 aa, Artificial Sequence
  Synthetic Polypeptide
DNNK

SEQ ID NO: 11209 - protein, 4 aa, Artificial Sequence
  Synthetic Polypeptide
GNSN

SEQ ID NO: 11210 - protein, 4 aa, Artificial Sequence
  Synthetic Polypeptide
SNNQ

SEQ ID NO: 11211 - protein, 4 aa, Artificial Sequence
  Synthetic Polypeptide
LASN

SEQ ID NO: 11212 - protein, 4 aa, Artificial Sequence
  Synthetic Polypeptide
LASN

SEQ ID NO: 11213 - protein, 4 aa, Artificial Sequence
  Synthetic Polypeptide
WAST

SEQ ID NO: 11214 - protein, 4 aa, Artificial Sequence
  Synthetic Polypeptide
WAST

SEQ ID NO: 11215 - protein, 4 aa, Artificial Sequence
  Synthetic Polypeptide
SGSG

SEQ ID NO: 11216 - protein, 4 aa, Artificial Sequence
  Synthetic Polypeptide
ETSK

SEQ ID NO: 11217 - protein, 4 aa, Artificial Sequence
  Synthetic Polypeptide
WAST

SEQ ID NO: 11218 - protein, 4 aa, Artificial Sequence
  Synthetic Polypeptide
RVSN

SEQ ID NO: 11219 - protein, 4 aa, Artificial Sequence
  Synthetic Polypeptide
AASN

SEQ ID NO: 11220 - protein, 4 aa, Artificial Sequence
  Synthetic Polypeptide
AWYS

SEQ ID NO: 11221 - protein, 4 aa, Artificial Sequence
  Synthetic Polypeptide
RMSN

SEQ ID NO: 11222 - protein, 4 aa, Artificial Sequence
  Synthetic Polypeptide
GATT

SEQ ID NO: 11223 - protein, 4 aa, Artificial Sequence
  Synthetic Polypeptide
ATSN

SEQ ID NO: 11224 - protein, 4 aa, Artificial Sequence
  Synthetic Polypeptide
DASN

SEQ ID NO: 11225 - protein, 4 aa, Artificial Sequence
  Synthetic Polypeptide
RANR

SEQ ID NO: 11226 - protein, 4 aa, Artificial Sequence
  Synthetic Polypeptide
LVSK

SEQ ID NO: 11227 - protein, 4 aa, Artificial Sequence
  Synthetic Polypeptide
SPSY

SEQ ID NO: 11228 - protein, 4 aa, Artificial Sequence
  Synthetic Polypeptide
YASN

SEQ ID NO: 11229 - protein, 4 aa, Artificial Sequence
  Synthetic Polypeptide
STSN

SEQ ID NO: 11230 - protein, 4 aa, Artificial Sequence
  Synthetic Polypeptide
STSN

SEQ ID NO: 11231 - protein, 4 aa, Artificial Sequence
  Synthetic Polypeptide
KVSN

SEQ ID NO: 11232 - protein, 4 aa, Artificial Sequence
  Synthetic Polypeptide
DVSK

SEQ ID NO: 11233 - protein, 4 aa, Artificial Sequence
  Synthetic Polypeptide
GNSN

SEQ ID NO: 11234 - protein, 4 aa, Artificial Sequence
  Synthetic Polypeptide
DVSK

SEQ ID NO: 11235 - protein, 4 aa, Artificial Sequence
  Synthetic Polypeptide
DASN

SEQ ID NO: 11236 - protein, 4 aa, Artificial Sequence
  Synthetic Polypeptide
KVSN

SEQ ID NO: 11237 - protein, 4 aa, Artificial Sequence
  Synthetic Polypeptide
DDSD

SEQ ID NO: 11238 - protein, 4 aa, Artificial Sequence
  Synthetic Polypeptide
RASN

SEQ ID NO: 11239 - protein, 4 aa, Artificial Sequence
  Synthetic Polypeptide
LASN

SEQ ID NO: 11240 - protein, 4 aa, Artificial Sequence
  Synthetic Polypeptide
LASN

SEQ ID NO: 11241 - protein, 4 aa, Artificial Sequence
  Synthetic Polypeptide
AATD

SEQ ID NO: 11242 - protein, 4 aa, Artificial Sequence
  Synthetic Polypeptide
GKNN

SEQ ID NO: 11243 - protein, 4 aa, Artificial Sequence
  Synthetic Polypeptide
DVSN

SEQ ID NO: 11244 - protein, 4 aa, Artificial Sequence
  Synthetic Polypeptide
DADK

SEQ ID NO: 11245 - protein, 4 aa, Artificial Sequence
  Synthetic Polypeptide
EVNN

SEQ ID NO: 11246 - protein, 4 aa, Artificial Sequence
  Synthetic Polypeptide
DVSN

SEQ ID NO: 11247 - protein, 4 aa, Artificial Sequence
  Synthetic Polypeptide
RTSN

SEQ ID NO: 11248 - protein, 4 aa, Artificial Sequence
  Synthetic Polypeptide
AATS

SEQ ID NO: 11249 - protein, 4 aa, Artificial Sequence
  Synthetic Polypeptide
AASN

SEQ ID NO: 11250 - protein, 4 aa, Artificial Sequence
  Synthetic Polypeptide
AAST

SEQ ID NO: 11251 - protein, 4 aa, Artificial Sequence
  Synthetic Polypeptide
YTSI

SEQ ID NO: 11252 - protein, 4 aa, Artificial Sequence
  Synthetic Polypeptide
WAST

SEQ ID NO: 11253 - protein, 4 aa, Artificial Sequence
  Synthetic Polypeptide
KIST

SEQ ID NO: 11254 - protein, 4 aa, Artificial Sequence
  Synthetic Polypeptide
AATN

SEQ ID NO: 11255 - protein, 4 aa, Artificial Sequence
  Synthetic Polypeptide
KVSN

SEQ ID NO: 11256 - protein, 4 aa, Artificial Sequence
  Synthetic Polypeptide
DTSS

SEQ ID NO: 11257 - protein, 4 aa, Artificial Sequence
  Synthetic Polypeptide
LEGS

SEQ ID NO: 11258 - protein, 4 aa, Artificial Sequence
  Synthetic Polypeptide
LASN

SEQ ID NO: 11259 - protein, 4 aa, Artificial Sequence
  Synthetic Polypeptide
DASN

SEQ ID NO: 11260 - protein, 4 aa, Artificial Sequence
  Synthetic Polypeptide
DASN

SEQ ID NO: 11261 - protein, 4 aa, Artificial Sequence
  Synthetic Polypeptide
ASST

SEQ ID NO: 11262 - protein, 4 aa, Artificial Sequence
  Synthetic Polypeptide
VASR

SEQ ID NO: 11263 - protein, 4 aa, Artificial Sequence
  Synthetic Polypeptide
AAST

SEQ ID NO: 11264 - protein, 4 aa, Artificial Sequence
  Synthetic Polypeptide
DVSK

SEQ ID NO: 11265 - protein, 4 aa, Artificial Sequence
  Synthetic Polypeptide
YTSG

SEQ ID NO: 11266 - protein, 4 aa, Artificial Sequence
  Synthetic Polypeptide
WAST

SEQ ID NO: 11267 - protein, 4 aa, Artificial Sequence
  Synthetic Polypeptide
YTSR

SEQ ID NO: 11268 - protein, 4 aa, Artificial Sequence
  Synthetic Polypeptide
STSN

SEQ ID NO: 11269 - protein, 4 aa, Artificial Sequence
  Synthetic Polypeptide
DTSN

SEQ ID NO: 11270 - protein, 4 aa, Artificial Sequence
  Synthetic Polypeptide
NTKT

SEQ ID NO: 11271 - protein, 4 aa, Artificial Sequence
  Synthetic Polypeptide
DTSK

SEQ ID NO: 11272 - protein, 4 aa, Artificial Sequence
  Synthetic Polypeptide
GATT

SEQ ID NO: 11273 - protein, 4 aa, Artificial Sequence
  Synthetic Polypeptide
GASS

SEQ ID NO: 11274 - protein, 4 aa, Artificial Sequence
  Synthetic Polypeptide
LASN

SEQ ID NO: 11275 - protein, 4 aa, Artificial Sequence
  Synthetic Polypeptide
DASN

SEQ ID NO: 11276 - protein, 4 aa, Artificial Sequence
  Synthetic Polypeptide
GASS

SEQ ID NO: 11277 - protein, 4 aa, Artificial Sequence
  Synthetic Polypeptide
GASR

SEQ ID NO: 11278 - protein, 4 aa, Artificial Sequence
  Synthetic Polypeptide
SASF

SEQ ID NO: 11279 - protein, 4 aa, Artificial Sequence
  Synthetic Polypeptide
AASV

SEQ ID NO: 11280 - protein, 7 aa, Artificial Sequence
  Synthetic Polypeptide
AASRLQS

SEQ ID NO: 11281 - protein, 4 aa, Artificial Sequence
  Synthetic Polypeptide
RISR

SEQ ID NO: 11282 - protein, 4 aa, Artificial Sequence
  Synthetic Polypeptide
AAST

SEQ ID NO: 11283 - protein, 4 aa, Artificial Sequence
  Synthetic Polypeptide
GASS

SEQ ID NO: 11284 - protein, 4 aa, Artificial Sequence
  Synthetic Polypeptide
KVSN

SEQ ID NO: 11285 - protein, 4 aa, Artificial Sequence
  Synthetic Polypeptide
YASN

SEQ ID NO: 11286 - protein, 4 aa, Artificial Sequence
  Synthetic Polypeptide
AASS

SEQ ID NO: 11287 - protein, 4 aa, Artificial Sequence
  Synthetic Polypeptide
QDNR

SEQ ID NO: 11288 - protein, 4 aa, Artificial Sequence
  Synthetic Polypeptide
AASS

SEQ ID NO: 11289 - protein, 4 aa, Artificial Sequence
  Synthetic Polypeptide
LASN

SEQ ID NO: 11290 - protein, 4 aa, Artificial Sequence
  Synthetic Polypeptide
YTSR

SEQ ID NO: 11291 - protein, 4 aa, Artificial Sequence
  Synthetic Polypeptide
RASN

SEQ ID NO: 11292 - protein, 4 aa, Artificial Sequence
  Synthetic Polypeptide
DASN

SEQ ID NO: 11293 - protein, 4 aa, Artificial Sequence
  Synthetic Polypeptide
GTNK

SEQ ID NO: 11294 - protein, 4 aa, Artificial Sequence
  Synthetic Polypeptide
GASS

SEQ ID NO: 11295 - protein, 4 aa, Artificial Sequence
  Synthetic Polypeptide
GTSN

SEQ ID NO: 11296 - protein, 4 aa, Artificial Sequence
  Synthetic Polypeptide
SASY

SEQ ID NO: 11297 - protein, 4 aa, Artificial Sequence
  Synthetic Polypeptide
YTSS

SEQ ID NO: 11298 - protein, 4 aa, Artificial Sequence
  Synthetic Polypeptide
GISN

SEQ ID NO: 11299 - protein, 4 aa, Artificial Sequence
  Synthetic Polypeptide
YTSI

SEQ ID NO: 11300 - protein, 4 aa, Artificial Sequence
  Synthetic Polypeptide
SASL

SEQ ID NO: 11301 - protein, 4 aa, Artificial Sequence
  Synthetic Polypeptide
YTSI

SEQ ID NO: 11302 - protein, 4 aa, Artificial Sequence
  Synthetic Polypeptide
GATT

SEQ ID NO: 11303 - protein, 4 aa, Artificial Sequence
  Synthetic Polypeptide
DDSD

SEQ ID NO: 11304 - protein, 4 aa, Artificial Sequence
  Synthetic Polypeptide
AATS

SEQ ID NO: 11305 - protein, 4 aa, Artificial Sequence
  Synthetic Polypeptide
AASN

SEQ ID NO: 11306 - protein, 4 aa, Artificial Sequence
  Synthetic Polypeptide
LVSN

SEQ ID NO: 11307 - protein, 4 aa, Artificial Sequence
  Synthetic Polypeptide
GSSS

SEQ ID NO: 11308 - protein, 4 aa, Artificial Sequence
  Synthetic Polypeptide
DDSD

SEQ ID NO: 11309 - protein, 4 aa, Artificial Sequence
  Synthetic Polypeptide
DDSD

SEQ ID NO: 11310 - protein, 4 aa, Artificial Sequence
  Synthetic Polypeptide
DDSD

SEQ ID NO: 11311 - protein, 4 aa, Artificial Sequence
  Synthetic Polypeptide
DDSD

SEQ ID NO: 11312 - protein, 4 aa, Artificial Sequence
  Synthetic Polypeptide
DDSD

SEQ ID NO: 11313 - protein, 4 aa, Artificial Sequence
  Synthetic Polypeptide
DDSD

SEQ ID NO: 11314 - protein, 4 aa, Artificial Sequence
  Synthetic Polypeptide
YDDS

SEQ ID NO: 11315 - protein, 4 aa, Artificial Sequence
  Synthetic Polypeptide
YDDS

SEQ ID NO: 11316 - protein, 4 aa, Artificial Sequence
  Synthetic Polypeptide
YDDS

SEQ ID NO: 11317 - protein, 4 aa, Artificial Sequence
  Synthetic Polypeptide
YDDS

SEQ ID NO: 11318 - protein, 4 aa, Artificial Sequence
  Synthetic Polypeptide
YDDS

SEQ ID NO: 11319 - protein, 4 aa, Artificial Sequence
  Synthetic Polypeptide
YDDS

SEQ ID NO: 11320 - protein, 4 aa, Artificial Sequence
  Synthetic Polypeptide
YDDS

SEQ ID NO: 11321 - protein, 4 aa, Artificial Sequence
  Synthetic Polypeptide
YDDS

SEQ ID NO: 11322 - protein, 4 aa, Artificial Sequence
  Synthetic Polypeptide
DASN

SEQ ID NO: 11323 - protein, 4 aa, Artificial Sequence
  Synthetic Polypeptide
WAST

SEQ ID NO: 11324 - protein, 4 aa, Artificial Sequence
  Synthetic Polypeptide
AASS

SEQ ID NO: 11325 - protein, 4 aa, Artificial Sequence
  Synthetic Polypeptide
ATSN

SEQ ID NO: 11326 - protein, 4 aa, Artificial Sequence
  Synthetic Polypeptide
SASS

SEQ ID NO: 11327 - protein, 4 aa, Artificial Sequence
  Synthetic Polypeptide
WTST

SEQ ID NO: 11328 - protein, 4 aa, Artificial Sequence
  Synthetic Polypeptide
STSN

SEQ ID NO: 11329 - protein, 4 aa, Artificial Sequence
  Synthetic Polypeptide
SASF

SEQ ID NO: 11330 - protein, 4 aa, Artificial Sequence
  Synthetic Polypeptide
GASS

SEQ ID NO: 11331 - protein, 4 aa, Artificial Sequence
  Synthetic Polypeptide
EDSV

SEQ ID NO: 11332 - protein, 4 aa, Artificial Sequence
  Synthetic Polypeptide
SASY

SEQ ID NO: 11333 - protein, 4 aa, Artificial Sequence
  Synthetic Polypeptide
AASS

SEQ ID NO: 11334 - protein, 4 aa, Artificial Sequence
  Synthetic Polypeptide
DVSN

SEQ ID NO: 11335 - protein, 4 aa, Artificial Sequence
  Synthetic Polypeptide
AASS

SEQ ID NO: 11336 - protein, 4 aa, Artificial Sequence
  Synthetic Polypeptide
AASS

SEQ ID NO: 11337 - protein, 4 aa, Artificial Sequence
  Synthetic Polypeptide
KTSN

SEQ ID NO: 11338 - protein, 4 aa, Artificial Sequence
  Synthetic Polypeptide
HAST

SEQ ID NO: 11339 - protein, 4 aa, Artificial Sequence
  Synthetic Polypeptide
AASL

SEQ ID NO: 11340 - protein, 4 aa, Artificial Sequence
  Synthetic Polypeptide
AASS

SEQ ID NO: 11341 - protein, 4 aa, Artificial Sequence
  Synthetic Polypeptide
WAST

SEQ ID NO: 11342 - protein, 4 aa, Artificial Sequence
  Synthetic Polypeptide
WAST

SEQ ID NO: 11343 - protein, 4 aa, Artificial Sequence
  Synthetic Polypeptide
WAST

SEQ ID NO: 11344 - protein, 4 aa, Artificial Sequence
  Synthetic Polypeptide
WAST

SEQ ID NO: 11345 - protein, 4 aa, Artificial Sequence
  Synthetic Polypeptide
WAST

SEQ ID NO: 11346 - protein, 4 aa, Artificial Sequence
  Synthetic Polypeptide
STSN

SEQ ID NO: 11347 - protein, 4 aa, Artificial Sequence
  Synthetic Polypeptide
STSN

SEQ ID NO: 11348 - protein, 4 aa, Artificial Sequence
  Synthetic Polypeptide
LASN

SEQ ID NO: 11349 - protein, 4 aa, Artificial Sequence
  Synthetic Polypeptide
LASN

SEQ ID NO: 11350 - protein, 5 aa, Artificial Sequence
  Synthetic Polypeptide
WASTR

SEQ ID NO: 11351 - protein, 5 aa, Artificial Sequence
  Synthetic Polypeptide
WASTR

SEQ ID NO: 11352 - protein, 5 aa, Artificial Sequence
  Synthetic Polypeptide
WASTR

SEQ ID NO: 11353 - protein, 7 aa, Artificial Sequence
  Synthetic Polypeptide
YTSRLHS

SEQ ID NO: 11354 - protein, 7 aa, Artificial Sequence
  Synthetic Polypeptide
YTSRLHS

SEQ ID NO: 11355 - protein, 7 aa, Artificial Sequence
  Synthetic Polypeptide
YTSRLHS

SEQ ID NO: 11356 - protein, 9 aa, Artificial Sequence
  Synthetic Polypeptide
QQNNKDPPT

SEQ ID NO: 11357 - protein, 9 aa, Artificial Sequence
  Synthetic Polypeptide
QQGSALPPT

SEQ ID NO: 11358 - protein, 9 aa, Artificial Sequence
  Synthetic Polypeptide
LQSRTIPRT

SEQ ID NO: 11359 - protein, 9 aa, Artificial Sequence
  Synthetic Polypeptide
QQYRKLPWT

SEQ ID NO: 11360 - protein, 9 aa, Artificial Sequence
  Synthetic Polypeptide
QNDYSYPYT

SEQ ID NO: 11361 - protein, 9 aa, Artificial Sequence
  Synthetic Polypeptide
QQYSKLPRT

SEQ ID NO: 11362 - protein, 8 aa, Artificial Sequence
  Synthetic Polypeptide
QHFWGTWT

SEQ ID NO: 11363 - protein, 9 aa, Artificial Sequence
  Synthetic Polypeptide
FQGSVYPFT

SEQ ID NO: 11364 - protein, 9 aa, Artificial Sequence
  Synthetic Polypeptide
QQGNTLPYT

SEQ ID NO: 11365 - protein, 9 aa, Artificial Sequence
  Synthetic Polypeptide
QQGNTLPYT

SEQ ID NO: 11366 - protein, 9 aa, Artificial Sequence
  Synthetic Polypeptide
QQRSNWPIT

SEQ ID NO: 11367 - protein, 9 aa, Artificial Sequence
  Synthetic Polypeptide
AQNLELPYT

SEQ ID NO: 11368 - protein, 9 aa, Artificial Sequence
  Synthetic Polypeptide
FQGSQFPYT

SEQ ID NO: 11369 - protein, 11 aa, Artificial Sequence
  Synthetic Polypeptide
QQRNNWPPMYT

SEQ ID NO: 11370 - protein, 9 aa, Artificial Sequence
  Synthetic Polypeptide
QQYDSYPIT

SEQ ID NO: 11371 - protein, 9 aa, Artificial Sequence
  Synthetic Polypeptide
QQSNEDPWT

SEQ ID NO: 11372 - protein, 9 aa, Artificial Sequence
  Synthetic Polypeptide
QQYNSYPPT

SEQ ID NO: 11373 - protein, 9 aa, Artificial Sequence
  Synthetic Polypeptide
FQGSHAPWT

SEQ ID NO: 11374 - protein, 9 aa, Artificial Sequence
  Synthetic Polypeptide
QQWSSHPFT

SEQ ID NO: 11375 - protein, 8 aa, Artificial Sequence
  Synthetic Polypeptide
HQYLSSRT

SEQ ID NO: 11376 - protein, 9 aa, Artificial Sequence
  Synthetic Polypeptide
QQSAHFPIT

SEQ ID NO: 11377 - protein, 9 aa, Artificial Sequence
  Synthetic Polypeptide
FQGSHVPRT

SEQ ID NO: 11378 - protein, 9 aa, Artificial Sequence
  Synthetic Polypeptide
QQGNSLPFT

SEQ ID NO: 11379 - protein, 9 aa, Artificial Sequence
  Synthetic Polypeptide
QQGNSLPFT

SEQ ID NO: 11380 - protein, 9 aa, Artificial Sequence
  Synthetic Polypeptide
WQGTHFPYT

SEQ ID NO: 11381 - protein, 9 aa, Artificial Sequence
  Synthetic Polypeptide
QQSNEDPLT

SEQ ID NO: 11382 - protein, 9 aa, Artificial Sequence
  Synthetic Polypeptide
QQYYSYPWT

SEQ ID NO: 11383 - protein, 9 aa, Artificial Sequence
  Synthetic Polypeptide
QQYYSYPWT

SEQ ID NO: 11384 - protein, 9 aa, Artificial Sequence
  Synthetic Polypeptide
QQYGSSPFT

SEQ ID NO: 11385 - protein, 9 aa, Artificial Sequence
  Synthetic Polypeptide
QQYYTSPYT

SEQ ID NO: 11386 - protein, 10 aa, Artificial Sequence
  Synthetic Polypeptide
QQSGTFPPTT

SEQ ID NO: 11387 - protein, 7 aa, Artificial Sequence
  Synthetic Polypeptide
KQSNLYT

SEQ ID NO: 11388 - protein, 8 aa, Artificial Sequence
  Synthetic Polypeptide
KQSYNLYT

SEQ ID NO: 11389 - protein, 9 aa, Artificial Sequence
  Synthetic Polypeptide
LQYAIYPYT

SEQ ID NO: 11390 - protein, 9 aa, Artificial Sequence
  Synthetic Polypeptide
QQNNYDPWT

SEQ ID NO: 11391 - protein, 9 aa, Artificial Sequence
  Synthetic Polypeptide
QQYSSYPYT

SEQ ID NO: 11392 - protein, 9 aa, Artificial Sequence
  Synthetic Polypeptide
QQHYSTPLT

SEQ ID NO: 11393 - protein, 10 aa, Artificial Sequence
  Synthetic Polypeptide
QSYDSSSIST

SEQ ID NO: 11394 - protein, 11 aa, Artificial Sequence
  Synthetic Polypeptide
ATVEAGLSGSV

SEQ ID NO: 11395 - protein, 9 aa, Artificial Sequence
  Synthetic Polypeptide
QQWRSNPFT

SEQ ID NO: 11396 - protein, 9 aa, Artificial Sequence
  Synthetic Polypeptide
QQDYTSPWT

SEQ ID NO: 11397 - protein, 9 aa, Artificial Sequence
  Synthetic Polypeptide
QQNNNWPTT

SEQ ID NO: 11398 - protein, 9 aa, Artificial Sequence
  Synthetic Polypeptide
WQGTHFPGT

SEQ ID NO: 11399 - protein, 9 aa, Artificial Sequence
  Synthetic Polypeptide
QQSDSLPIT

SEQ ID NO: 11400 - protein, 9 aa, Artificial Sequence
  Synthetic Polypeptide
QNDYSYPLT

SEQ ID NO: 11401 - protein, 9 aa, Artificial Sequence
  Synthetic Polypeptide
QQSYSTPFT

SEQ ID NO: 11402 - protein, 5 aa, Artificial Sequence
  Synthetic Polypeptide
QVLQS

SEQ ID NO: 11403 - protein, 9 aa, Artificial Sequence
  Synthetic Polypeptide
QQSREYPYT

SEQ ID NO: 11404 - protein, 10 aa, Artificial Sequence
  Synthetic Polypeptide
SQSTHVPPLT

SEQ ID NO: 11405 - protein, 6 aa, Artificial Sequence
  Synthetic Polypeptide
QQDYSS

SEQ ID NO: 11406 - protein, 9 aa, Artificial Sequence
  Synthetic Polypeptide
HQYSKLPWT

SEQ ID NO: 11407 - protein, 9 aa, Artificial Sequence
  Synthetic Polypeptide
GTDYTGGYV

SEQ ID NO: 11408 - protein, 9 aa, Artificial Sequence
  Synthetic Polypeptide
QQYNSYPPT

SEQ ID NO: 11409 - protein, 11 aa, Artificial Sequence
  Synthetic Polypeptide
GTWDSSLRGWV

SEQ ID NO: 11410 - protein, 9 aa, Artificial Sequence
  Synthetic Polypeptide
ATWDDSLSG

SEQ ID NO: 11411 - protein, 9 aa, Artificial Sequence
  Synthetic Polypeptide
QQHYTTPPT

SEQ ID NO: 11412 - protein, 10 aa, Artificial Sequence
  Synthetic Polypeptide
GSLVGNWDVI

SEQ ID NO: 11413 - protein, 9 aa, Artificial Sequence
  Synthetic Polypeptide
QQYGTSPYT

SEQ ID NO: 11414 - protein, 9 aa, Artificial Sequence
  Synthetic Polypeptide
QQYTFGPGT

SEQ ID NO: 11415 - protein, 9 aa, Artificial Sequence
  Synthetic Polypeptide
HQYHRSPLT

SEQ ID NO: 11416 - protein, 9 aa, Artificial Sequence
  Synthetic Polypeptide
QHHYSAPWT

SEQ ID NO: 11417 - protein, 9 aa, Artificial Sequence
  Synthetic Polypeptide
QQGNTLPWT

SEQ ID NO: 11418 - protein, 8 aa, Artificial Sequence
  Synthetic Polypeptide
LQYDNLWT

SEQ ID NO: 11419 - protein, 9 aa, Artificial Sequence
  Synthetic Polypeptide
QHFWSNPYT

SEQ ID NO: 11420 - protein, 8 aa, Artificial Sequence
  Synthetic Polypeptide
QHHYGTFT

SEQ ID NO: 11421 - protein, 9 aa, Artificial Sequence
  Synthetic Polypeptide
QQYNTYPFT

SEQ ID NO: 11422 - protein, 9 aa, Artificial Sequence
  Synthetic Polypeptide
QQYWTTPWT

SEQ ID NO: 11423 - protein, 9 aa, Artificial Sequence
  Synthetic Polypeptide
QQYWSSPWT

SEQ ID NO: 11424 - protein, 9 aa, Artificial Sequence
  Synthetic Polypeptide
QQYWSSPWT

SEQ ID NO: 11425 - protein, 9 aa, Artificial Sequence
  Synthetic Polypeptide
QQYHSYPTT

SEQ ID NO: 11426 - protein, 9 aa, Artificial Sequence
  Synthetic Polypeptide
QQYDNLPLT

SEQ ID NO: 11427 - protein, 9 aa, Artificial Sequence
  Synthetic Polypeptide
SQSTHVPYT

SEQ ID NO: 11428 - protein, 10 aa, Artificial Sequence
  Synthetic Polypeptide
QAWDTNLGGV

SEQ ID NO: 11429 - protein, 10 aa, Artificial Sequence
  Synthetic Polypeptide
HSYDSNNHSV

SEQ ID NO: 11430 - protein, 9 aa, Artificial Sequence
  Synthetic Polypeptide
QQGQSYPWT

SEQ ID NO: 11431 - protein, 9 aa, Artificial Sequence
  Synthetic Polypeptide
QHTNSWPTT

SEQ ID NO: 11432 - protein, 9 aa, Artificial Sequence
  Synthetic Polypeptide
QNDYSYPLT

SEQ ID NO: 11433 - protein, 9 aa, Artificial Sequence
  Synthetic Polypeptide
QQHYITPLT

SEQ ID NO: 11434 - protein, 11 aa, Artificial Sequence
  Synthetic Polypeptide
AAWDDSLNGWV

SEQ ID NO: 11435 - protein, 8 aa, Artificial Sequence
  Synthetic Polypeptide
QQYNSYAT

SEQ ID NO: 11436 - protein, 11 aa, Artificial Sequence
  Synthetic Polypeptide
QVWDSSSDHVV

SEQ ID NO: 11437 - protein, 9 aa, Artificial Sequence
  Synthetic Polypeptide
QQSNEDPPT

SEQ ID NO: 11438 - protein, 8 aa, Artificial Sequence
  Synthetic Polypeptide
QQYSNSWT

SEQ ID NO: 11439 - protein, 11 aa, Artificial Sequence
  Synthetic Polypeptide
DSRVSTGNHVV

SEQ ID NO: 11440 - protein, 9 aa, Artificial Sequence
  Synthetic Polypeptide
HQRRSYPFT

SEQ ID NO: 11441 - protein, 9 aa, Artificial Sequence
  Synthetic Polypeptide
LQYGNLLYA

SEQ ID NO: 11442 - protein, 9 aa, Artificial Sequence
  Synthetic Polypeptide
LQVYSTPRT

SEQ ID NO: 11443 - protein, 9 aa, Artificial Sequence
  Synthetic Polypeptide
HQYSNWMCS

SEQ ID NO: 11444 - protein, 8 aa, Artificial Sequence
  Synthetic Polypeptide
QQHHEYPL

SEQ ID NO: 11445 - protein, 11 aa, Artificial Sequence
  Synthetic Polypeptide
GTWDGSLYTML

SEQ ID NO: 11446 - protein, 12 aa, Artificial Sequence
  Synthetic Polypeptide
QSYDSSLSGSGV

SEQ ID NO: 11447 - protein, 13 aa, Artificial Sequence
  Synthetic Polypeptide
CATWDDNLNVHYV

SEQ ID NO: 11448 - protein, 9 aa, Artificial Sequence
  Synthetic Polypeptide
LQSRIFPRT

SEQ ID NO: 11449 - protein, 9 aa, Artificial Sequence
  Synthetic Polypeptide
LQSRTIPRT

SEQ ID NO: 11450 - protein, 9 aa, Artificial Sequence
  Synthetic Polypeptide
QNDYSYPYT

SEQ ID NO: 11451 - protein, 9 aa, Artificial Sequence
  Synthetic Polypeptide
QNDYSYPYT

SEQ ID NO: 11452 - protein, 9 aa, Artificial Sequence
  Synthetic Polypeptide
QQHNKYPYT

SEQ ID NO: 11453 - protein, 9 aa, Artificial Sequence
  Synthetic Polypeptide
QQWNYPSWT

SEQ ID NO: 11454 - protein, 9 aa, Artificial Sequence
  Synthetic Polypeptide
QQYYDTPLT

SEQ ID NO: 11455 - protein, 10 aa, Artificial Sequence
  Synthetic Polypeptide
LQTTHFPPWT

SEQ ID NO: 11456 - protein, 9 aa, Artificial Sequence
  Synthetic Polypeptide
QQSKEVPFT

SEQ ID NO: 11457 - protein, 9 aa, Artificial Sequence
  Synthetic Polypeptide
QQFNSYPYT

SEQ ID NO: 11458 - protein, 9 aa, Artificial Sequence
  Synthetic Polypeptide
MQHLEYPIT

SEQ ID NO: 11459 - protein, 9 aa, Artificial Sequence
  Synthetic Polypeptide
QQSWNTPWT

SEQ ID NO: 11460 - protein, 9 aa, Artificial Sequence
  Synthetic Polypeptide
QQWTFNPPT

SEQ ID NO: 11461 - protein, 9 aa, Artificial Sequence
  Synthetic Polypeptide
QQRSNWPIT

SEQ ID NO: 11462 - protein, 9 aa, Artificial Sequence
  Synthetic Polypeptide
LQYDEFPLT

SEQ ID NO: 11463 - protein, 9 aa, Artificial Sequence
  Synthetic Polypeptide
WQGTHFPRT

SEQ ID NO: 11464 - protein, 9 aa, Artificial Sequence
  Synthetic Polypeptide
QQLYSTPYT

SEQ ID NO: 11465 - protein, 9 aa, Artificial Sequence
  Synthetic Polypeptide
QHSWEIPLT

SEQ ID NO: 11466 - protein, 9 aa, Artificial Sequence
  Synthetic Polypeptide
QQYSGYPLT

SEQ ID NO: 11467 - protein, 9 aa, Artificial Sequence
  Synthetic Polypeptide
QQYSGYPLT

SEQ ID NO: 11468 - protein, 9 aa, Artificial Sequence
  Synthetic Polypeptide
SQSTHVPWT

SEQ ID NO: 11469 - protein, 10 aa, Artificial Sequence
  Synthetic Polypeptide
AAWDDSLSEF

SEQ ID NO: 11470 - protein, 12 aa, Artificial Sequence
  Synthetic Polypeptide
QSYDSSLSGSYV

SEQ ID NO: 11471 - protein, 10 aa, Artificial Sequence
  Synthetic Polypeptide
SSYTSSSTLV

SEQ ID NO: 11472 - protein, 8 aa, Artificial Sequence
  Synthetic Polypeptide
QQYDNLPL

SEQ ID NO: 11473 - protein, 9 aa, Artificial Sequence
  Synthetic Polypeptide
FQGSHVPWT

SEQ ID NO: 11474 - protein, 11 aa, Artificial Sequence
  Synthetic Polypeptide
QSYDSSLSGSV

SEQ ID NO: 11475 - protein, 9 aa, Artificial Sequence
  Synthetic Polypeptide
QQNNEDPWT

SEQ ID NO: 11476 - protein, 9 aa, Artificial Sequence
  Synthetic Polypeptide
LQSRTIPRT

SEQ ID NO: 11477 - protein, 9 aa, Artificial Sequence
  Synthetic Polypeptide
LQSRTIPRT

SEQ ID NO: 11478 - protein, 9 aa, Artificial Sequence
  Synthetic Polypeptide
QQYWSSPWT

SEQ ID NO: 11479 - protein, 9 aa, Artificial Sequence
  Synthetic Polypeptide
NSRDSSGWV

SEQ ID NO: 11480 - protein, 12 aa, Artificial Sequence
  Synthetic Polypeptide
SSYTSSSTLVYV

SEQ ID NO: 11481 - protein, 9 aa, Artificial Sequence
  Synthetic Polypeptide
SYAGGSTWV

SEQ ID NO: 11482 - protein, 11 aa, Artificial Sequence
  Synthetic Polypeptide
SSYTSGRTLYV

SEQ ID NO: 11483 - protein, 11 aa, Artificial Sequence
  Synthetic Polypeptide
SSYTSSSTLYV

SEQ ID NO: 11484 - protein, 9 aa, Artificial Sequence
  Synthetic Polypeptide
QQYHSYPTT

SEQ ID NO: 11485 - protein, 9 aa, Artificial Sequence
  Synthetic Polypeptide
QQYWTTPWT

SEQ ID NO: 11486 - protein, 10 aa, Artificial Sequence
  Synthetic Polypeptide
QQSYNWPYTF

SEQ ID NO: 11487 - protein, 9 aa, Artificial Sequence
  Synthetic Polypeptide
QQLNSYPLT

SEQ ID NO: 11488 - protein, 8 aa, Artificial Sequence
  Synthetic Polypeptide
QQGNTLPW

SEQ ID NO: 11489 - protein, 8 aa, Artificial Sequence
  Synthetic Polypeptide
QQYYNYPR

SEQ ID NO: 11490 - protein, 8 aa, Artificial Sequence
  Synthetic Polypeptide
FQGSHVPY

SEQ ID NO: 11491 - protein, 7 aa, Artificial Sequence
  Synthetic Polypeptide
QHFWGTP

SEQ ID NO: 11492 - protein, 8 aa, Artificial Sequence
  Synthetic Polypeptide
FQGSHVPL

SEQ ID NO: 11493 - protein, 7 aa, Artificial Sequence
  Synthetic Polypeptide
QWSSYPL

SEQ ID NO: 11494 - protein, 9 aa, Artificial Sequence
  Synthetic Polypeptide
GTDYPGNYL

SEQ ID NO: 11495 - protein, 8 aa, Artificial Sequence
  Synthetic Polypeptide
LQSRTIPR

SEQ ID NO: 11496 - protein, 8 aa, Artificial Sequence
  Synthetic Polypeptide
QQYGNLPF

SEQ ID NO: 11497 - protein, 8 aa, Artificial Sequence
  Synthetic Polypeptide
QQYGNLPF

SEQ ID NO: 11498 - protein, 8 aa, Artificial Sequence
  Synthetic Polypeptide
LQHNNFPW

SEQ ID NO: 11499 - protein, 8 aa, Artificial Sequence
  Synthetic Polypeptide
QHYGRTPF

SEQ ID NO: 11500 - protein, 8 aa, Artificial Sequence
  Synthetic Polypeptide
QQVNSYPL

SEQ ID NO: 11501 - protein, 9 aa, Artificial Sequence
  Synthetic Polypeptide
ASYAGNYNV

SEQ ID NO: 11502 - protein, 8 aa, Artificial Sequence
  Synthetic Polypeptide
QQYSILPW

SEQ ID NO: 11503 - protein, 7 aa, Artificial Sequence
  Synthetic Polypeptide
HQYLSSY

SEQ ID NO: 11504 - protein, 8 aa, Artificial Sequence
  Synthetic Polypeptide
QQGNTLPY

SEQ ID NO: 11505 - protein, 8 aa, Artificial Sequence
  Synthetic Polypeptide
HQYHRSPY

SEQ ID NO: 11506 - protein, 7 aa, Artificial Sequence
  Synthetic Polypeptide
QWSNYPL

SEQ ID NO: 11507 - protein, 8 aa, Artificial Sequence
  Synthetic Polypeptide
QHHYGTPF

SEQ ID NO: 11508 - protein, 9 aa, Artificial Sequence
  Synthetic Polypeptide
QQWNINPLT

SEQ ID NO: 11509 - protein, 9 aa, Artificial Sequence
  Synthetic Polypeptide
QQSWNTPWT

SEQ ID NO: 11510 - protein, 9 aa, Artificial Sequence
  Synthetic Polypeptide
CQQYGYSPP

SEQ ID NO: 11511 - protein, 9 aa, Artificial Sequence
  Synthetic Polypeptide
YYCLQSRTI

SEQ ID NO: 11512 - protein, 9 aa, Artificial Sequence
  Synthetic Polypeptide
QQRSNWPRT

SEQ ID NO: 11513 - protein, 9 aa, Artificial Sequence
  Synthetic Polypeptide
CQQYHHSPL

SEQ ID NO: 11514 - protein, 9 aa, Artificial Sequence
  Synthetic Polypeptide
CQQYVSYWT

SEQ ID NO: 11515 - protein, 9 aa, Artificial Sequence
  Synthetic Polypeptide
QQHYTTPPT

SEQ ID NO: 11516 - protein, 9 aa, Artificial Sequence
  Synthetic Polypeptide
QQSNSFPRT

SEQ ID NO: 11517 - protein, 9 aa, Artificial Sequence
  Synthetic Polypeptide
QQAKSFPRT

SEQ ID NO: 11518 - protein, 9 aa, Artificial Sequence
  Synthetic Polypeptide
GVYYCMQST

SEQ ID NO: 11519 - protein, 9 aa, Artificial Sequence
  Synthetic Polypeptide
QQLNSYPLT

SEQ ID NO: 11520 - protein, 9 aa, Artificial Sequence
  Synthetic Polypeptide
CQQYDRSPL

SEQ ID NO: 11521 - protein, 9 aa, Artificial Sequence
  Synthetic Polypeptide
GVYYCMQGT

SEQ ID NO: 11522 - protein, 9 aa, Artificial Sequence
  Synthetic Polypeptide
QDYSSPYTF

SEQ ID NO: 11523 - protein, 9 aa, Artificial Sequence
  Synthetic Polypeptide
QQTYSNPTF

SEQ ID NO: 11524 - protein, 9 aa, Artificial Sequence
  Synthetic Polypeptide
AWDSDTYVF

SEQ ID NO: 11525 - protein, 9 aa, Artificial Sequence
  Synthetic Polypeptide
QQSYITPLT

SEQ ID NO: 11526 - protein, 9 aa, Artificial Sequence
  Synthetic Polypeptide
TYYCQHSGE

SEQ ID NO: 11527 - protein, 9 aa, Artificial Sequence
  Synthetic Polypeptide
QQYGKLPYT

SEQ ID NO: 11528 - protein, 9 aa, Artificial Sequence
  Synthetic Polypeptide
VYYCQQTNE

SEQ ID NO: 11529 - protein, 9 aa, Artificial Sequence
  Synthetic Polypeptide
QQKKSMPLT

SEQ ID NO: 11530 - protein, 10 aa, Artificial Sequence
  Synthetic Polypeptide
YCALWYSNLW

SEQ ID NO: 11531 - protein, 9 aa, Artificial Sequence
  Synthetic Polypeptide
CQQYTNEHY

SEQ ID NO: 11532 - protein, 9 aa, Artificial Sequence
  Synthetic Polypeptide
CQQWSSYPH

SEQ ID NO: 11533 - protein, 9 aa, Artificial Sequence
  Synthetic Polypeptide
QQYITYPYT

SEQ ID NO: 11534 - protein, 9 aa, Artificial Sequence
  Synthetic Polypeptide
QQYSKLPLT

SEQ ID NO: 11535 - protein, 8 aa, Artificial Sequence
  Synthetic Polypeptide
LQGTHQPY

SEQ ID NO: 11536 - protein, 7 aa, Artificial Sequence
  Synthetic Polypeptide
QQGNTLP

SEQ ID NO: 11537 - protein, 7 aa, Artificial Sequence
  Synthetic Polypeptide
QQYNNYP

SEQ ID NO: 11538 - protein, 7 aa, Artificial Sequence
  Synthetic Polypeptide
QQGNTLP

SEQ ID NO: 11539 - protein, 7 aa, Artificial Sequence
  Synthetic Polypeptide
QQSWNTP

SEQ ID NO: 11540 - protein, 8 aa, Artificial Sequence
  Synthetic Polypeptide
QVWDSSSD

SEQ ID NO: 11541 - protein, 7 aa, Artificial Sequence
  Synthetic Polypeptide
QQYWSSP

SEQ ID NO: 11542 - protein, 7 aa, Artificial Sequence
  Synthetic Polypeptide
QQSKEVP

SEQ ID NO: 11543 - protein, 7 aa, Artificial Sequence
  Synthetic Polypeptide
QQFSELP

SEQ ID NO: 11544 - protein, 7 aa, Artificial Sequence
  Synthetic Polypeptide
QQLYSSP

SEQ ID NO: 11545 - protein, 9 aa, Artificial Sequence
  Synthetic Polypeptide
QVWDSSSDH

SEQ ID NO: 11546 - protein, 9 aa, Artificial Sequence
  Synthetic Polypeptide
QVWDSSSDH

SEQ ID NO: 11547 - protein, 9 aa, Artificial Sequence
  Synthetic Polypeptide
QVWDSSSDH

SEQ ID NO: 11548 - protein, 9 aa, Artificial Sequence
  Synthetic Polypeptide
QVWDSSSDH

SEQ ID NO: 11549 - protein, 9 aa, Artificial Sequence
  Synthetic Polypeptide
QVWDSSSDH

SEQ ID NO: 11550 - protein, 9 aa, Artificial Sequence
  Synthetic Polypeptide
QVWDSSSDH

SEQ ID NO: 11551 - protein, 11 aa, Artificial Sequence
  Synthetic Polypeptide
QVWDSSSDHVV

SEQ ID NO: 11552 - protein, 11 aa, Artificial Sequence
  Synthetic Polypeptide
QVWDSSSDHVV

SEQ ID NO: 11553 - protein, 11 aa, Artificial Sequence
  Synthetic Polypeptide
QVWDSSSDHVV

SEQ ID NO: 11554 - protein, 11 aa, Artificial Sequence
  Synthetic Polypeptide
QVWDSSSDHVV

SEQ ID NO: 11555 - protein, 11 aa, Artificial Sequence
  Synthetic Polypeptide
QVWDSSSDHVV

SEQ ID NO: 11556 - protein, 11 aa, Artificial Sequence
  Synthetic Polypeptide
QVWDSSSDHVV

SEQ ID NO: 11557 - protein, 11 aa, Artificial Sequence
  Synthetic Polypeptide
QVWDSSSDHVV

SEQ ID NO: 11558 - protein, 11 aa, Artificial Sequence
  Synthetic Polypeptide
QVWDSSSDHVV

SEQ ID NO: 11559 - protein, 7 aa, Artificial Sequence
  Synthetic Polypeptide
QQRSNWP

SEQ ID NO: 11560 - protein, 7 aa, Artificial Sequence
  Synthetic Polypeptide
QQYYSTP

SEQ ID NO: 11561 - protein, 7 aa, Artificial Sequence
  Synthetic Polypeptide
QQDYNFP

SEQ ID NO: 11562 - protein, 7 aa, Artificial Sequence
  Synthetic Polypeptide
QQWTSNP

SEQ ID NO: 11563 - protein, 7 aa, Artificial Sequence
  Synthetic Polypeptide
QQHFRTP

SEQ ID NO: 11564 - protein, 6 aa, Artificial Sequence
  Synthetic Polypeptide
QQYSLY

SEQ ID NO: 11565 - protein, 7 aa, Artificial Sequence
  Synthetic Polypeptide
HQWSSYP

SEQ ID NO: 11566 - protein, 7 aa, Artificial Sequence
  Synthetic Polypeptide
QQAYTTP

SEQ ID NO: 11567 - protein, 5 aa, Artificial Sequence
  Synthetic Polypeptide
QQYVS

SEQ ID NO: 11568 - protein, 7 aa, Artificial Sequence
  Synthetic Polypeptide
QSTYGDD

SEQ ID NO: 11569 - protein, 7 aa, Artificial Sequence
  Synthetic Polypeptide
QQYHTYP

SEQ ID NO: 11570 - protein, 7 aa, Artificial Sequence
  Synthetic Polypeptide
QQSYSTP

SEQ ID NO: 11571 - protein, 6 aa, Artificial Sequence
  Synthetic Polypeptide
TSYGSY

SEQ ID NO: 11572 - protein, 7 aa, Artificial Sequence
  Synthetic Polypeptide
QQSYSTP

SEQ ID NO: 11573 - protein, 7 aa, Artificial Sequence
  Synthetic Polypeptide
QQSYSTP

SEQ ID NO: 11574 - protein, 7 aa, Artificial Sequence
  Synthetic Polypeptide
QQSWNGP

SEQ ID NO: 11575 - protein, 7 aa, Artificial Sequence
  Synthetic Polypeptide
LQHYTSP

SEQ ID NO: 11576 - protein, 7 aa, Artificial Sequence
  Synthetic Polypeptide
QHLKSYP

SEQ ID NO: 11577 - protein, 7 aa, Artificial Sequence
  Synthetic Polypeptide
QQSYSTP

SEQ ID NO: 11578 - protein, 7 aa, Artificial Sequence
  Synthetic Polypeptide
QQYNSYP

SEQ ID NO: 11579 - protein, 7 aa, Artificial Sequence
  Synthetic Polypeptide
QQYNSYP

SEQ ID NO: 11580 - protein, 7 aa, Artificial Sequence
  Synthetic Polypeptide
QQYNSYP

SEQ ID NO: 11581 - protein, 7 aa, Artificial Sequence
  Synthetic Polypeptide
QQYNSYP

SEQ ID NO: 11582 - protein, 7 aa, Artificial Sequence
  Synthetic Polypeptide
QQYNSYP

SEQ ID NO: 11583 - protein, 7 aa, Artificial Sequence
  Synthetic Polypeptide
QQRSSSP

SEQ ID NO: 11584 - protein, 7 aa, Artificial Sequence
  Synthetic Polypeptide
QQRSSSP

SEQ ID NO: 11585 - protein, 7 aa, Artificial Sequence
  Synthetic Polypeptide
QHSRELP

SEQ ID NO: 11586 - protein, 7 aa, Artificial Sequence
  Synthetic Polypeptide
QQHWSYP

SEQ ID NO: 11587 - protein, 8 aa, Artificial Sequence
  Synthetic Polypeptide
HQYLSSYT

SEQ ID NO: 11588 - protein, 8 aa, Artificial Sequence
  Synthetic Polypeptide
HQYLSSYT

SEQ ID NO: 11589 - protein, 8 aa, Artificial Sequence
  Synthetic Polypeptide
HQYLSSYT

SEQ ID NO: 11590 - protein, 9 aa, Artificial Sequence
  Synthetic Polypeptide
QQGNTLPYT

SEQ ID NO: 11591 - protein, 9 aa, Artificial Sequence
  Synthetic Polypeptide
QQGNTLPYT

SEQ ID NO: 11592 - protein, 9 aa, Artificial Sequence
  Synthetic Polypeptide
QQGNTLPWT

SEQ ID NO: 11593 - protein, 7 aa, Artificial Sequence
  Synthetic Polypeptide
GYAFSSY

SEQ ID NO: 11594 - protein, 6 aa, Artificial Sequence
  Synthetic Polypeptide
GYTFTD

SEQ ID NO: 11595 - protein, 8 aa, Artificial Sequence
  Synthetic Polypeptide
GYTFRHYS

SEQ ID NO: 11596 - protein, 8 aa, Artificial Sequence
  Synthetic Polypeptide
GGTFSNYW

SEQ ID NO: 11597 - protein, 8 aa, Artificial Sequence
  Synthetic Polypeptide
GYSFTDYY

SEQ ID NO: 11598 - protein, 8 aa, Artificial Sequence
  Synthetic Polypeptide
GYTFSNYW

SEQ ID NO: 11599 - protein, 8 aa, Artificial Sequence
  Synthetic Polypeptide
GYTFTDYY

SEQ ID NO: 11600 - protein, 10 aa, Artificial Sequence
  Synthetic Polypeptide
GGSISTSGMG

SEQ ID NO: 11601 - protein, 8 aa, Artificial Sequence
  Synthetic Polypeptide
GVSLPDYG

SEQ ID NO: 11602 - protein, 8 aa, Artificial Sequence
  Synthetic Polypeptide
GVSLPDYG

SEQ ID NO: 11603 - protein, 8 aa, Artificial Sequence
  Synthetic Polypeptide
GFTFNDYA

SEQ ID NO: 11604 - protein, 8 aa, Artificial Sequence
  Synthetic Polypeptide
GYAFSYSW

SEQ ID NO: 11605 - protein, 8 aa, Artificial Sequence
  Synthetic Polypeptide
GYEFSRSW

SEQ ID NO: 11606 - protein, 8 aa, Artificial Sequence
  Synthetic Polypeptide
GGTFSSYA

SEQ ID NO: 11607 - protein, 8 aa, Artificial Sequence
  Synthetic Polypeptide
GGSFSAYY

SEQ ID NO: 11608 - protein, 8 aa, Artificial Sequence
  Synthetic Polypeptide
GYTFTDYY

SEQ ID NO: 11609 - protein, 8 aa, Artificial Sequence
  Synthetic Polypeptide
GFAFSSST

SEQ ID NO: 11610 - protein, 8 aa, Artificial Sequence
  Synthetic Polypeptide
GFTFSSYG

SEQ ID NO: 11611 - protein, 9 aa, Artificial Sequence
  Synthetic Polypeptide
GFSITSDYS

SEQ ID NO: 11612 - protein, 8 aa, Artificial Sequence
  Synthetic Polypeptide
GYTFTSYY

SEQ ID NO: 11613 - protein, 7 aa, Artificial Sequence
  Synthetic Polypeptide
GYTFTNY

SEQ ID NO: 11614 - protein, 8 aa, Artificial Sequence
  Synthetic Polypeptide
GYTFTNYG

SEQ ID NO: 11615 - protein, 8 aa, Artificial Sequence
  Synthetic Polypeptide
GYSFTAYS

SEQ ID NO: 11616 - protein, 8 aa, Artificial Sequence
  Synthetic Polypeptide
GYSFTAYS

SEQ ID NO: 11617 - protein, 8 aa, Artificial Sequence
  Synthetic Polypeptide
GYTFTNYG

SEQ ID NO: 11618 - protein, 7 aa, Artificial Sequence
  Synthetic Polypeptide
GYTFTSY

SEQ ID NO: 11619 - protein, 8 aa, Artificial Sequence
  Synthetic Polypeptide
GYTFSSYW

SEQ ID NO: 11620 - protein, 8 aa, Artificial Sequence
  Synthetic Polypeptide
GYTLTDHT

SEQ ID NO: 11621 - protein, 8 aa, Artificial Sequence
  Synthetic Polypeptide
GDSITSYY

SEQ ID NO: 11622 - protein, 8 aa, Artificial Sequence
  Synthetic Polypeptide
GFTFSSYA

SEQ ID NO: 11623 - protein, 8 aa, Artificial Sequence
  Synthetic Polypeptide
GFTFSSHG

SEQ ID NO: 11624 - protein, 8 aa, Artificial Sequence
  Synthetic Polypeptide
GYTFTEYI

SEQ ID NO: 11625 - protein, 8 aa, Artificial Sequence
  Synthetic Polypeptide
GFTFSTSG

SEQ ID NO: 11626 - protein, 8 aa, Artificial Sequence
  Synthetic Polypeptide
GYTFTSYF

SEQ ID NO: 11627 - protein, 8 aa, Artificial Sequence
  Synthetic Polypeptide
GYTFTSYV

SEQ ID NO: 11628 - protein, 9 aa, Artificial Sequence
  Synthetic Polypeptide
SGFDFSRYW

SEQ ID NO: 11629 - protein, 8 aa, Artificial Sequence
  Synthetic Polypeptide
GYSFTTYW

SEQ ID NO: 11630 - protein, 8 aa, Artificial Sequence
  Synthetic Polypeptide
GYTLTELS

SEQ ID NO: 11631 - protein, 8 aa, Artificial Sequence
  Synthetic Polypeptide
GYTLTELS

SEQ ID NO: 11632 - protein, 10 aa, Artificial Sequence
  Synthetic Polypeptide
GFSLSTSGMG

SEQ ID NO: 11633 - protein, 8 aa, Artificial Sequence
  Synthetic Polypeptide
GYTFTNYG

SEQ ID NO: 11634 - protein, 8 aa, Artificial Sequence
  Synthetic Polypeptide
GFSLTNYG

SEQ ID NO: 11635 - protein, 8 aa, Artificial Sequence
  Synthetic Polypeptide
GFNIEDYY

SEQ ID NO: 11636 - protein, 8 aa, Artificial Sequence
  Synthetic Polypeptide
GFTFSSYG

SEQ ID NO: 11637 - protein, 8 aa, Artificial Sequence
  Synthetic Polypeptide
GYAFTNYW

SEQ ID NO: 11638 - protein, 8 aa, Artificial Sequence
  Synthetic Polypeptide
GGTFSSYA

SEQ ID NO: 11639 - protein, 8 aa, Artificial Sequence
  Synthetic Polypeptide
GYTFTAHI

SEQ ID NO: 11640 - protein, 8 aa, Artificial Sequence
  Synthetic Polypeptide
GYTFTGYF

SEQ ID NO: 11641 - protein, 8 aa, Artificial Sequence
  Synthetic Polypeptide
GSSFTGYN

SEQ ID NO: 11642 - protein, 8 aa, Artificial Sequence
  Synthetic Polypeptide
GFSVTNYG

SEQ ID NO: 11643 - protein, 8 aa, Artificial Sequence
  Synthetic Polypeptide
GFAFSHYA

SEQ ID NO: 11644 - protein, 6 aa, Artificial Sequence
  Synthetic Polypeptide
GFSLSY

SEQ ID NO: 11645 - protein, 8 aa, Artificial Sequence
  Synthetic Polypeptide
GFTFSRYK

SEQ ID NO: 11646 - protein, 8 aa, Artificial Sequence
  Synthetic Polypeptide
GFTFSNYA

SEQ ID NO: 11647 - protein, 8 aa, Artificial Sequence
  Synthetic Polypeptide
GFTFSDYY

SEQ ID NO: 11648 - protein, 8 aa, Artificial Sequence
  Synthetic Polypeptide
GFNIKDTY

SEQ ID NO: 11649 - protein, 10 aa, Artificial Sequence
  Synthetic Polypeptide
GDSTAACNSF

SEQ ID NO: 11650 - protein, 8 aa, Artificial Sequence
  Synthetic Polypeptide
GGTFSMYG

SEQ ID NO: 11651 - protein, 8 aa, Artificial Sequence
  Synthetic Polypeptide
GFTFSWYS

SEQ ID NO: 11652 - protein, 8 aa, Artificial Sequence
  Synthetic Polypeptide
GFSLTKYG

SEQ ID NO: 11653 - protein, 8 aa, Artificial Sequence
  Synthetic Polypeptide
GFTFSRNG

SEQ ID NO: 11654 - protein, 8 aa, Artificial Sequence
  Synthetic Polypeptide
GYTFTRYW

SEQ ID NO: 11655 - protein, 8 aa, Artificial Sequence
  Synthetic Polypeptide
GYIFTNYN

SEQ ID NO: 11656 - protein, 15 aa, Artificial Sequence
  Synthetic Polypeptide
ELVRPGTGYAFTNYL

SEQ ID NO: 11657 - protein, 8 aa, Artificial Sequence
  Synthetic Polypeptide
GFSLTSYG

SEQ ID NO: 11658 - protein, 8 aa, Artificial Sequence
  Synthetic Polypeptide
GFTFSNYW

SEQ ID NO: 11659 - protein, 10 aa, Artificial Sequence
  Synthetic Polypeptide
GYSITIDYTW

SEQ ID NO: 11660 - protein, 10 aa, Artificial Sequence
  Synthetic Polypeptide
GYSITSDYTW

SEQ ID NO: 11661 - protein, 10 aa, Artificial Sequence
  Synthetic Polypeptide
GYSITSDYTW

SEQ ID NO: 11662 - protein, 9 aa, Artificial Sequence
  Synthetic Polypeptide
GFSFNTYAM

SEQ ID NO: 11663 - protein, 8 aa, Artificial Sequence
  Synthetic Polypeptide
GFTFSSYA

SEQ ID NO: 11664 - protein, 8 aa, Artificial Sequence
  Synthetic Polypeptide
GYTFTGYV

SEQ ID NO: 11665 - protein, 8 aa, Artificial Sequence
  Synthetic Polypeptide
GYTFTGYY

SEQ ID NO: 11666 - protein, 8 aa, Artificial Sequence
  Synthetic Polypeptide
GFTFSSYA

SEQ ID NO: 11667 - protein, 8 aa, Artificial Sequence
  Synthetic Polypeptide
GYSFTGYF

SEQ ID NO: 11668 - protein, 8 aa, Artificial Sequence
  Synthetic Polypeptide
GYTFTDHA

SEQ ID NO: 11669 - protein, 8 aa, Artificial Sequence
  Synthetic Polypeptide
GYTFTDHA

SEQ ID NO: 11670 - protein, 8 aa, Artificial Sequence
  Synthetic Polypeptide
GYTFTNYG

SEQ ID NO: 11671 - protein, 8 aa, Artificial Sequence
  Synthetic Polypeptide
GYSFTNFW

SEQ ID NO: 11672 - protein, 8 aa, Artificial Sequence
  Synthetic Polypeptide
GYNFSNKW

SEQ ID NO: 11673 - protein, 8 aa, Artificial Sequence
  Synthetic Polypeptide
GFTFDDYG

SEQ ID NO: 11674 - protein, 8 aa, Artificial Sequence
  Synthetic Polypeptide
GYIFTNYG

SEQ ID NO: 11675 - protein, 8 aa, Artificial Sequence
  Synthetic Polypeptide
GFTFSSYD

SEQ ID NO: 11676 - protein, 8 aa, Artificial Sequence
  Synthetic Polypeptide
GYTFTSYA

SEQ ID NO: 11677 - protein, 8 aa, Artificial Sequence
  Synthetic Polypeptide
GYTFTNFW

SEQ ID NO: 11678 - protein, 8 aa, Artificial Sequence
  Synthetic Polypeptide
GYTFTSYW

SEQ ID NO: 11679 - protein, 10 aa, Artificial Sequence
  Synthetic Polypeptide
GFRFTFNNYY

SEQ ID NO: 11680 - protein, 8 aa, Artificial Sequence
  Synthetic Polypeptide
GFTFSRYA

SEQ ID NO: 11681 - protein, 8 aa, Artificial Sequence
  Synthetic Polypeptide
GYTITSGY

SEQ ID NO: 11682 - protein, 8 aa, Artificial Sequence
  Synthetic Polypeptide
GFTFSNAW

SEQ ID NO: 11683 - protein, 8 aa, Artificial Sequence
  Synthetic Polypeptide
GFTFDDYA

SEQ ID NO: 11684 - protein, 8 aa, Artificial Sequence
  Synthetic Polypeptide
GGTFSSYA

SEQ ID NO: 11685 - protein, 8 aa, Artificial Sequence
  Synthetic Polypeptide
GYTFTDYS

SEQ ID NO: 11686 - protein, 8 aa, Artificial Sequence
  Synthetic Polypeptide
GYTFTHYS

SEQ ID NO: 11687 - protein, 8 aa, Artificial Sequence
  Synthetic Polypeptide
GYTFTDYY

SEQ ID NO: 11688 - protein, 8 aa, Artificial Sequence
  Synthetic Polypeptide
GYTFTDYY

SEQ ID NO: 11689 - protein, 8 aa, Artificial Sequence
  Synthetic Polypeptide
GYTFTSYW

SEQ ID NO: 11690 - protein, 8 aa, Artificial Sequence
  Synthetic Polypeptide
GFTFSDYN

SEQ ID NO: 11691 - protein, 8 aa, Artificial Sequence
  Synthetic Polypeptide
GFSLTSYH

SEQ ID NO: 11692 - protein, 8 aa, Artificial Sequence
  Synthetic Polypeptide
GYRIKDFL

SEQ ID NO: 11693 - protein, 8 aa, Artificial Sequence
  Synthetic Polypeptide
GFTFSSSW

SEQ ID NO: 11694 - protein, 8 aa, Artificial Sequence
  Synthetic Polypeptide
GYSFSSSW

SEQ ID NO: 11695 - protein, 8 aa, Artificial Sequence
  Synthetic Polypeptide
GYTFTSYV

SEQ ID NO: 11696 - protein, 8 aa, Artificial Sequence
  Synthetic Polypeptide
GYAFSSYW

SEQ ID NO: 11697 - protein, 8 aa, Artificial Sequence
  Synthetic Polypeptide
GYTFTSYN

SEQ ID NO: 11698 - protein, 8 aa, Artificial Sequence
  Synthetic Polypeptide
GFTFHDYA

SEQ ID NO: 11699 - protein, 8 aa, Artificial Sequence
  Synthetic Polypeptide
GYTFTNYD

SEQ ID NO: 11700 - protein, 8 aa, Artificial Sequence
  Synthetic Polypeptide
GYTFKDTY

SEQ ID NO: 11701 - protein, 8 aa, Artificial Sequence
  Synthetic Polypeptide
GYTFTDYY

SEQ ID NO: 11702 - protein, 8 aa, Artificial Sequence
  Synthetic Polypeptide
GYSFTDYY

SEQ ID NO: 11703 - protein, 9 aa, Artificial Sequence
  Synthetic Polypeptide
GYSITSAYY

SEQ ID NO: 11704 - protein, 9 aa, Artificial Sequence
  Synthetic Polypeptide
GYSITSAYY

SEQ ID NO: 11705 - protein, 8 aa, Artificial Sequence
  Synthetic Polypeptide
GFTFGHYW

SEQ ID NO: 11706 - protein, 8 aa, Artificial Sequence
  Synthetic Polypeptide
GFTFGSFS

SEQ ID NO: 11707 - protein, 8 aa, Artificial Sequence
  Synthetic Polypeptide
GFSFSGTA

SEQ ID NO: 11708 - protein, 8 aa, Artificial Sequence
  Synthetic Polypeptide
GFTFSSYA

SEQ ID NO: 11709 - protein, 8 aa, Artificial Sequence
  Synthetic Polypeptide
GVTLSDYG

SEQ ID NO: 11710 - protein, 8 aa, Artificial Sequence
  Synthetic Polypeptide
GYTFTDFY

SEQ ID NO: 11711 - protein, 8 aa, Artificial Sequence
  Synthetic Polypeptide
GYSFTSYW

SEQ ID NO: 11712 - protein, 8 aa, Artificial Sequence
  Synthetic Polypeptide
GYTFTNYY

SEQ ID NO: 11713 - protein, 8 aa, Artificial Sequence
  Synthetic Polypeptide
GYTFTHYS

SEQ ID NO: 11714 - protein, 8 aa, Artificial Sequence
  Synthetic Polypeptide
GYTFRHYS

SEQ ID NO: 11715 - protein, 9 aa, Artificial Sequence
  Synthetic Polypeptide
GYSITSDYT

SEQ ID NO: 11716 - protein, 8 aa, Artificial Sequence
  Synthetic Polypeptide
GFTFDDYA

SEQ ID NO: 11717 - protein, 10 aa, Artificial Sequence
  Synthetic Polypeptide
GDSVLSNSDT

SEQ ID NO: 11718 - protein, 8 aa, Artificial Sequence
  Synthetic Polypeptide
GYTFTSYD

SEQ ID NO: 11719 - protein, 10 aa, Artificial Sequence
  Synthetic Polypeptide
GDSVSSNSAA

SEQ ID NO: 11720 - protein, 10 aa, Artificial Sequence
  Synthetic Polypeptide
GDSMLSNSDT

SEQ ID NO: 11721 - protein, 8 aa, Artificial Sequence
  Synthetic Polypeptide
GFSFNTYA

SEQ ID NO: 11722 - protein, 9 aa, Artificial Sequence
  Synthetic Polypeptide
GYSITIDYT

SEQ ID NO: 11723 - protein, 8 aa, Artificial Sequence
  Synthetic Polypeptide
GFTFSNFE

SEQ ID NO: 11724 - protein, 8 aa, Artificial Sequence
  Synthetic Polypeptide
GFTFSTYG

SEQ ID NO: 11725 - protein, 5 aa, Artificial Sequence
  Synthetic Polypeptide
IYDMS

SEQ ID NO: 11726 - protein, 6 aa, Artificial Sequence
  Synthetic Polypeptide
SDYAWN

SEQ ID NO: 11727 - protein, 5 aa, Artificial Sequence
  Synthetic Polypeptide
DYYMH

SEQ ID NO: 11728 - protein, 5 aa, Artificial Sequence
  Synthetic Polypeptide
NYGVH

SEQ ID NO: 11729 - protein, 5 aa, Artificial Sequence
  Synthetic Polypeptide
SYWIH

SEQ ID NO: 11730 - protein, 5 aa, Artificial Sequence
  Synthetic Polypeptide
GSWMN

SEQ ID NO: 11731 - protein, 5 aa, Artificial Sequence
  Synthetic Polypeptide
DYYMS

SEQ ID NO: 11732 - protein, 5 aa, Artificial Sequence
  Synthetic Polypeptide
DYSIN

SEQ ID NO: 11733 - protein, 7 aa, Artificial Sequence
  Synthetic Polypeptide
SGGFYWS

SEQ ID NO: 11734 - protein, 5 aa, Artificial Sequence
  Synthetic Polypeptide
SYYWS

SEQ ID NO: 11735 - protein, 7 aa, Artificial Sequence
  Synthetic Polypeptide
NARMGVS

SEQ ID NO: 11736 - protein, 5 aa, Artificial Sequence
  Synthetic Polypeptide
NYGMH

SEQ ID NO: 11737 - protein, 7 aa, Artificial Sequence
  Synthetic Polypeptide
SSTYYWG

SEQ ID NO: 11738 - protein, 5 aa, Artificial Sequence
  Synthetic Polypeptide
TYAMN

SEQ ID NO: 11739 - protein, 5 aa, Artificial Sequence
  Synthetic Polypeptide
SSWMN

SEQ ID NO: 11740 - protein, 5 aa, Artificial Sequence
  Synthetic Polypeptide
TYWMH

SEQ ID NO: 11741 - protein, 5 aa, Artificial Sequence
  Synthetic Polypeptide
DYFMS

SEQ ID NO: 11742 - protein, 5 aa, Artificial Sequence
  Synthetic Polypeptide
NSWIN

SEQ ID NO: 11743 - protein, 5 aa, Artificial Sequence
  Synthetic Polypeptide
EYTIN

SEQ ID NO: 11744 - protein, 5 aa, Artificial Sequence
  Synthetic Polypeptide
DYWVH

SEQ ID NO: 11745 - protein, 5 aa, Artificial Sequence
  Synthetic Polypeptide
SSWMN

SEQ ID NO: 11746 - protein, 5 aa, Artificial Sequence
  Synthetic Polypeptide
SYWVN

SEQ ID NO: 11747 - protein, 5 aa, Artificial Sequence
  Synthetic Polypeptide
SYAMS

SEQ ID NO: 11748 - protein, 5 aa, Artificial Sequence
  Synthetic Polypeptide
DYSIN

SEQ ID NO: 11749 - protein, 5 aa, Artificial Sequence
  Synthetic Polypeptide
NYGIS

SEQ ID NO: 11750 - protein, 5 aa, Artificial Sequence
  Synthetic Polypeptide
GRSMN

SEQ ID NO: 11751 - protein, 5 aa, Artificial Sequence
  Synthetic Polypeptide
SYGMH

SEQ ID NO: 11752 - protein, 5 aa, Artificial Sequence
  Synthetic Polypeptide
DTYIH

SEQ ID NO: 11753 - protein, 5 aa, Artificial Sequence
  Synthetic Polypeptide
DYYMT

SEQ ID NO: 11754 - protein, 5 aa, Artificial Sequence
  Synthetic Polypeptide
DHYMS

SEQ ID NO: 11755 - protein, 5 aa, Artificial Sequence
  Synthetic Polypeptide
NYGMH

SEQ ID NO: 11756 - protein, 5 aa, Artificial Sequence
  Synthetic Polypeptide
SYDMH

SEQ ID NO: 11757 - protein, 5 aa, Artificial Sequence
  Synthetic Polypeptide
SFYWS

SEQ ID NO: 11758 - protein, 5 aa, Artificial Sequence
  Synthetic Polypeptide
NYYMH

SEQ ID NO: 11759 - protein, 5 aa, Artificial Sequence
  Synthetic Polypeptide
TYYIH

SEQ ID NO: 11760 - protein, 7 aa, Artificial Sequence
  Synthetic Polypeptide
NNNYYWT

SEQ ID NO: 11761 - protein, 5 aa, Artificial Sequence
  Synthetic Polypeptide
RYYVH

SEQ ID NO: 11762 - protein, 5 aa, Artificial Sequence
  Synthetic Polypeptide
SYAMS

SEQ ID NO: 11763 - protein, 5 aa, Artificial Sequence
  Synthetic Polypeptide
SYGMS

SEQ ID NO: 11764 - protein, 5 aa, Artificial Sequence
  Synthetic Polypeptide
DAWMD

SEQ ID NO: 11765 - protein, 5 aa, Artificial Sequence
  Synthetic Polypeptide
DTYMH

SEQ ID NO: 11766 - protein, 5 aa, Artificial Sequence
  Synthetic Polypeptide
SYAIS

SEQ ID NO: 11767 - protein, 5 aa, Artificial Sequence
  Synthetic Polypeptide
NAWMS

SEQ ID NO: 11768 - protein, 5 aa, Artificial Sequence
  Synthetic Polypeptide
SYYMH

SEQ ID NO: 11769 - protein, 5 aa, Artificial Sequence
  Synthetic Polypeptide
NYLIE

SEQ ID NO: 11770 - protein, 5 aa, Artificial Sequence
  Synthetic Polypeptide
RYWMS

SEQ ID NO: 11771 - protein, 5 aa, Artificial Sequence
  Synthetic Polypeptide
GYNIH

SEQ ID NO: 11772 - protein, 8 aa, Artificial Sequence
  Synthetic Polypeptide
GYRFTNYW

SEQ ID NO: 11773 - protein, 8 aa, Artificial Sequence
  Synthetic Polypeptide
GFAFSIYD

SEQ ID NO: 11774 - protein, 8 aa, Artificial Sequence
  Synthetic Polypeptide
GIDFSRYW

SEQ ID NO: 11775 - protein, 8 aa, Artificial Sequence
  Synthetic Polypeptide
GFAFSIYD

SEQ ID NO: 11776 - protein, 8 aa, Artificial Sequence
  Synthetic Polypeptide
GYAFSSYW

SEQ ID NO: 11777 - protein, 10 aa, Artificial Sequence
  Synthetic Polypeptide
GGSISSGSYF

SEQ ID NO: 11778 - protein, 9 aa, Artificial Sequence
  Synthetic Polypeptide
GYSITSDYT

SEQ ID NO: 11779 - protein, 8 aa, Artificial Sequence
  Synthetic Polypeptide
GDSITSGY

SEQ ID NO: 11780 - protein, 8 aa, Artificial Sequence
  Synthetic Polypeptide
GFSLSTSG

SEQ ID NO: 11781 - protein, 10 aa, Artificial Sequence
  Synthetic Polypeptide
GDSVSSNSAA

SEQ ID NO: 11782 - protein, 10 aa, Artificial Sequence
  Synthetic Polypeptide
GGSISSSSYF

SEQ ID NO: 11783 - protein, 10 aa, Artificial Sequence
  Synthetic Polypeptide
GGSISSSSYI

SEQ ID NO: 11784 - protein, 10 aa, Artificial Sequence
  Synthetic Polypeptide
GGSISSGSYF

SEQ ID NO: 11785 - protein, 10 aa, Artificial Sequence
  Synthetic Polypeptide
GGSISSGSYF

SEQ ID NO: 11786 - protein, 10 aa, Artificial Sequence
  Synthetic Polypeptide
GGSISSGSYF

SEQ ID NO: 11787 - protein, 10 aa, Artificial Sequence
  Synthetic Polypeptide
GGSISSGSYF

SEQ ID NO: 11788 - protein, 10 aa, Artificial Sequence
  Synthetic Polypeptide
GGSISSGSYF

SEQ ID NO: 11789 - protein, 10 aa, Artificial Sequence
  Synthetic Polypeptide
GGSISSGSYF

SEQ ID NO: 11790 - protein, 10 aa, Artificial Sequence
  Synthetic Polypeptide
GGSISSGSYF

SEQ ID NO: 11791 - protein, 10 aa, Artificial Sequence
  Synthetic Polypeptide
GGSISSGSYF

SEQ ID NO: 11792 - protein, 10 aa, Artificial Sequence
  Synthetic Polypeptide
GGSISSGSYF

SEQ ID NO: 11793 - protein, 10 aa, Artificial Sequence
  Synthetic Polypeptide
GGSISSSSYF

SEQ ID NO: 11794 - protein, 10 aa, Artificial Sequence
  Synthetic Polypeptide
GGSISSSSYF

SEQ ID NO: 11795 - protein, 10 aa, Artificial Sequence
  Synthetic Polypeptide
GGSISSSSYF

SEQ ID NO: 11796 - protein, 8 aa, Artificial Sequence
  Synthetic Polypeptide
GGTFSTYA

SEQ ID NO: 11797 - protein, 8 aa, Artificial Sequence
  Synthetic Polypeptide
GYSFTSYW

SEQ ID NO: 11798 - protein, 8 aa, Artificial Sequence
  Synthetic Polypeptide
GGTFSSYG

SEQ ID NO: 11799 - protein, 8 aa, Artificial Sequence
  Synthetic Polypeptide
GYTFTSYN

SEQ ID NO: 11800 - protein, 8 aa, Artificial Sequence
  Synthetic Polypeptide
GYPFTNYG

SEQ ID NO: 11801 - protein, 8 aa, Artificial Sequence
  Synthetic Polypeptide
GFDFTTYW

SEQ ID NO: 11802 - protein, 9 aa, Artificial Sequence
  Synthetic Polypeptide
GFTISSGYS

SEQ ID NO: 11803 - protein, 8 aa, Artificial Sequence
  Synthetic Polypeptide
GFNIKDTY

SEQ ID NO: 11804 - protein, 8 aa, Artificial Sequence
  Synthetic Polypeptide
GFTFSSYA

SEQ ID NO: 11805 - protein, 8 aa, Artificial Sequence
  Synthetic Polypeptide
GFTFNTAW

SEQ ID NO: 11806 - protein, 8 aa, Artificial Sequence
  Synthetic Polypeptide
GYTFTTYT

SEQ ID NO: 11807 - protein, 8 aa, Artificial Sequence
  Synthetic Polypeptide
GFTFDDYG

SEQ ID NO: 11808 - protein, 8 aa, Artificial Sequence
  Synthetic Polypeptide
GGTFSSYA

SEQ ID NO: 11809 - protein, 8 aa, Artificial Sequence
  Synthetic Polypeptide
GFTFDDYG

SEQ ID NO: 11810 - protein, 8 aa, Artificial Sequence
  Synthetic Polypeptide
GFTFDDYA

SEQ ID NO: 11811 - protein, 8 aa, Artificial Sequence
  Synthetic Polypeptide
GLSLTSNG

SEQ ID NO: 11812 - protein, 8 aa, Artificial Sequence
  Synthetic Polypeptide
GFSLTSYH

SEQ ID NO: 11813 - protein, 8 aa, Artificial Sequence
  Synthetic Polypeptide
GFTFDDYG

SEQ ID NO: 11814 - protein, 8 aa, Artificial Sequence
  Synthetic Polypeptide
GFTFSSYW

SEQ ID NO: 11815 - protein, 8 aa, Artificial Sequence
  Synthetic Polypeptide
GYTFTEYT

SEQ ID NO: 11816 - protein, 8 aa, Artificial Sequence
  Synthetic Polypeptide
GYTFTEYT

SEQ ID NO: 11817 - protein, 8 aa, Artificial Sequence
  Synthetic Polypeptide
GYTFTEYT

SEQ ID NO: 11818 - protein, 8 aa, Artificial Sequence
  Synthetic Polypeptide
GYTFTEYT

SEQ ID NO: 11819 - protein, 8 aa, Artificial Sequence
  Synthetic Polypeptide
GYTFTEYT

SEQ ID NO: 11820 - protein, 8 aa, Artificial Sequence
  Synthetic Polypeptide
GFTFSRYG

SEQ ID NO: 11821 - protein, 8 aa, Artificial Sequence
  Synthetic Polypeptide
GFTFSRYG

SEQ ID NO: 11822 - protein, 8 aa, Artificial Sequence
  Synthetic Polypeptide
GFTFSGYA

SEQ ID NO: 11823 - protein, 8 aa, Artificial Sequence
  Synthetic Polypeptide
GFAFSTYD

SEQ ID NO: 11824 - protein, 8 aa, Artificial Sequence
  Synthetic Polypeptide
GYTFTSYW

SEQ ID NO: 11825 - protein, 8 aa, Artificial Sequence
  Synthetic Polypeptide
GFTFTSYW

SEQ ID NO: 11826 - protein, 8 aa, Artificial Sequence
  Synthetic Polypeptide
GYTFTSYW

SEQ ID NO: 11827 - protein, 8 aa, Artificial Sequence
  Synthetic Polypeptide
GYTFSDYF

SEQ ID NO: 11828 - protein, 8 aa, Artificial Sequence
  Synthetic Polypeptide
GFTFSDYF

SEQ ID NO: 11829 - protein, 8 aa, Artificial Sequence
  Synthetic Polypeptide
GFTFSDYF

SEQ ID NO: 11830 - protein, 8 aa, Artificial Sequence
  Synthetic Polypeptide
IYPGDGDT

SEQ ID NO: 11831 - protein, 7 aa, Artificial Sequence
  Synthetic Polypeptide
IDPETGG

SEQ ID NO: 11832 - protein, 8 aa, Artificial Sequence
  Synthetic Polypeptide
INTESGVP

SEQ ID NO: 11833 - protein, 8 aa, Artificial Sequence
  Synthetic Polypeptide
TYRGHSDT

SEQ ID NO: 11834 - protein, 8 aa, Artificial Sequence
  Synthetic Polypeptide
IIPSNGAT

SEQ ID NO: 11835 - protein, 8 aa, Artificial Sequence
  Synthetic Polypeptide
ILPGTGRT

SEQ ID NO: 11836 - protein, 8 aa, Artificial Sequence
  Synthetic Polypeptide
INPNNGGT

SEQ ID NO: 11837 - protein, 7 aa, Artificial Sequence
  Synthetic Polypeptide
IWWDDDK

SEQ ID NO: 11838 - protein, 7 aa, Artificial Sequence
  Synthetic Polypeptide
IWGSETT

SEQ ID NO: 11839 - protein, 7 aa, Artificial Sequence
  Synthetic Polypeptide
IWGSETT

SEQ ID NO: 11840 - protein, 8 aa, Artificial Sequence
  Synthetic Polypeptide
ISWNSGSI

SEQ ID NO: 11841 - protein, 8 aa, Artificial Sequence
  Synthetic Polypeptide
IFPGDGDT

SEQ ID NO: 11842 - protein, 8 aa, Artificial Sequence
  Synthetic Polypeptide
IYPGDGDT

SEQ ID NO: 11843 - protein, 8 aa, Artificial Sequence
  Synthetic Polypeptide
IIPILGTA

SEQ ID NO: 11844 - protein, 7 aa, Artificial Sequence
  Synthetic Polypeptide
INHGGGT

SEQ ID NO: 11845 - protein, 8 aa, Artificial Sequence
  Synthetic Polypeptide
IYPGSGNT

SEQ ID NO: 11846 - protein, 7 aa, Artificial Sequence
  Synthetic Polypeptide
IGSGGGI

SEQ ID NO: 11847 - protein, 8 aa, Artificial Sequence
  Synthetic Polypeptide
ITTRSSTI

SEQ ID NO: 11848 - protein, 7 aa, Artificial Sequence
  Synthetic Polypeptide
ISYSGHT

SEQ ID NO: 11849 - protein, 8 aa, Artificial Sequence
  Synthetic Polypeptide
IYPGNDDI

SEQ ID NO: 11850 - protein, 8 aa, Artificial Sequence
  Synthetic Polypeptide
INTYTGEP

SEQ ID NO: 11851 - protein, 8 aa, Artificial Sequence
  Synthetic Polypeptide
INTNTGEP

SEQ ID NO: 11852 - protein, 8 aa, Artificial Sequence
  Synthetic Polypeptide
IDPYYGDT

SEQ ID NO: 11853 - protein, 8 aa, Artificial Sequence
  Synthetic Polypeptide
IDPYYGDT

SEQ ID NO: 11854 - protein, 8 aa, Artificial Sequence
  Synthetic Polypeptide
INTYTGEP

SEQ ID NO: 11855 - protein, 8 aa, Artificial Sequence
  Synthetic Polypeptide
IDPSDSET

SEQ ID NO: 11856 - protein, 8 aa, Artificial Sequence
  Synthetic Polypeptide
ILPGGGDT

SEQ ID NO: 11857 - protein, 8 aa, Artificial Sequence
  Synthetic Polypeptide
IYPRDGIT

SEQ ID NO: 11858 - protein, 7 aa, Artificial Sequence
  Synthetic Polypeptide
IYYSGST

SEQ ID NO: 11859 - protein, 8 aa, Artificial Sequence
  Synthetic Polypeptide
IRSSGSST

SEQ ID NO: 11860 - protein, 8 aa, Artificial Sequence
  Synthetic Polypeptide
ISGSGSNT

SEQ ID NO: 11861 - protein, 8 aa, Artificial Sequence
  Synthetic Polypeptide
FYPGSGSI

SEQ ID NO: 11862 - protein, 8 aa, Artificial Sequence
  Synthetic Polypeptide
ISSGSTTI

SEQ ID NO: 11863 - protein, 8 aa, Artificial Sequence
  Synthetic Polypeptide
INPYNDGS

SEQ ID NO: 11864 - protein, 8 aa, Artificial Sequence
  Synthetic Polypeptide
INPYNDGT

SEQ ID NO: 11865 - protein, 8 aa, Artificial Sequence
  Synthetic Polypeptide
INPDSSTI

SEQ ID NO: 11866 - protein, 8 aa, Artificial Sequence
  Synthetic Polypeptide
IHPSDSET

SEQ ID NO: 11867 - protein, 8 aa, Artificial Sequence
  Synthetic Polypeptide
FDPEENEI

SEQ ID NO: 11868 - protein, 8 aa, Artificial Sequence
  Synthetic Polypeptide
FDPEENEI

SEQ ID NO: 11869 - protein, 7 aa, Artificial Sequence
  Synthetic Polypeptide
IWWDDVK

SEQ ID NO: 11870 - protein, 8 aa, Artificial Sequence
  Synthetic Polypeptide
INTYTGEP

SEQ ID NO: 11871 - protein, 7 aa, Artificial Sequence
  Synthetic Polypeptide
IWSGGNT

SEQ ID NO: 11872 - protein, 8 aa, Artificial Sequence
  Synthetic Polypeptide
IDPENDET

SEQ ID NO: 11873 - protein, 8 aa, Artificial Sequence
  Synthetic Polypeptide
ISYDGSNK

SEQ ID NO: 11874 - protein, 8 aa, Artificial Sequence
  Synthetic Polypeptide
IFPGSGNI

SEQ ID NO: 11875 - protein, 8 aa, Artificial Sequence
  Synthetic Polypeptide
IIPIFGTA

SEQ ID NO: 11876 - protein, 8 aa, Artificial Sequence
  Synthetic Polypeptide
IKPQYGAV

SEQ ID NO: 11877 - protein, 8 aa, Artificial Sequence
  Synthetic Polypeptide
IHPYDGDT

SEQ ID NO: 11878 - protein, 8 aa, Artificial Sequence
  Synthetic Polypeptide
IDPYYGGT

SEQ ID NO: 11879 - protein, 8 aa, Artificial Sequence
  Synthetic Polypeptide
IWAGGITN

SEQ ID NO: 11880 - protein, 8 aa, Artificial Sequence
  Synthetic Polypeptide
ISSGGSGT

SEQ ID NO: 11881 - protein, 7 aa, Artificial Sequence
  Synthetic Polypeptide
IGGSGDT

SEQ ID NO: 11882 - protein, 8 aa, Artificial Sequence
  Synthetic Polypeptide
ISRSGRDI

SEQ ID NO: 11883 - protein, 8 aa, Artificial Sequence
  Synthetic Polypeptide
INGRGSST

SEQ ID NO: 11884 - protein, 8 aa, Artificial Sequence
  Synthetic Polypeptide
ISSSGSTI

SEQ ID NO: 11885 - protein, 8 aa, Artificial Sequence
  Synthetic Polypeptide
IYPTNGYT

SEQ ID NO: 11886 - protein, 13 aa, Artificial Sequence
  Synthetic Polypeptide
LSHCASYWNRGWT

SEQ ID NO: 11887 - protein, 8 aa, Artificial Sequence
  Synthetic Polypeptide
IIPIFGTS

SEQ ID NO: 11888 - protein, 8 aa, Artificial Sequence
  Synthetic Polypeptide
IVPWGDFT

SEQ ID NO: 11889 - protein, 8 aa, Artificial Sequence
  Synthetic Polypeptide
VKWAGGST

SEQ ID NO: 11890 - protein, 8 aa, Artificial Sequence
  Synthetic Polypeptide
VSSGGSYI

SEQ ID NO: 11891 - protein, 8 aa, Artificial Sequence
  Synthetic Polypeptide
INPRNDRT

SEQ ID NO: 11892 - protein, 8 aa, Artificial Sequence
  Synthetic Polypeptide
IYPGNGDA

SEQ ID NO: 11893 - protein, 8 aa, Artificial Sequence
  Synthetic Polypeptide
INPGSGGT

SEQ ID NO: 11894 - protein, 7 aa, Artificial Sequence
  Synthetic Polypeptide
IWSDGST

SEQ ID NO: 11895 - protein, 10 aa, Artificial Sequence
  Synthetic Polypeptide
IRFKSHNYAT

SEQ ID NO: 11896 - protein, 7 aa, Artificial Sequence
  Synthetic Polypeptide
ITYSGST

SEQ ID NO: 11897 - protein, 7 aa, Artificial Sequence
  Synthetic Polypeptide
ITYSGST

SEQ ID NO: 11898 - protein, 7 aa, Artificial Sequence
  Synthetic Polypeptide
ITYSGST

SEQ ID NO: 11899 - protein, 10 aa, Artificial Sequence
  Synthetic Polypeptide
IRSKSNNFAT

SEQ ID NO: 11900 - protein, 8 aa, Artificial Sequence
  Synthetic Polypeptide
ISYDGSNK

SEQ ID NO: 11901 - protein, 8 aa, Artificial Sequence
  Synthetic Polypeptide
INPYNDDI

SEQ ID NO: 11902 - protein, 8 aa, Artificial Sequence
  Synthetic Polypeptide
INPNSGGT

SEQ ID NO: 11903 - protein, 8 aa, Artificial Sequence
  Synthetic Polypeptide
ISGSGGST

SEQ ID NO: 11904 - protein, 8 aa, Artificial Sequence
  Synthetic Polypeptide
FNPYNGET

SEQ ID NO: 11905 - protein, 8 aa, Artificial Sequence
  Synthetic Polypeptide
FSPGNGDI

SEQ ID NO: 11906 - protein, 8 aa, Artificial Sequence
  Synthetic Polypeptide
FSPGNTDI

SEQ ID NO: 11907 - protein, 8 aa, Artificial Sequence
  Synthetic Polypeptide
INTKTGEP

SEQ ID NO: 11908 - protein, 8 aa, Artificial Sequence
  Synthetic Polypeptide
VDPGYSYS

SEQ ID NO: 11909 - protein, 8 aa, Artificial Sequence
  Synthetic Polypeptide
IYPGYSDI

SEQ ID NO: 11910 - protein, 8 aa, Artificial Sequence
  Synthetic Polypeptide
INWNGGST

SEQ ID NO: 11911 - protein, 8 aa, Artificial Sequence
  Synthetic Polypeptide
INTYTGES

SEQ ID NO: 11912 - protein, 8 aa, Artificial Sequence
  Synthetic Polypeptide
ISYDGTNE

SEQ ID NO: 11913 - protein, 8 aa, Artificial Sequence
  Synthetic Polypeptide
INAGNGNT

SEQ ID NO: 11914 - protein, 8 aa, Artificial Sequence
  Synthetic Polypeptide
IDPSDSYT

SEQ ID NO: 11915 - protein, 8 aa, Artificial Sequence
  Synthetic Polypeptide
IYPGGGYT

SEQ ID NO: 11916 - protein, 8 aa, Artificial Sequence
  Synthetic Polypeptide
ISSSGDPT

SEQ ID NO: 11917 - protein, 8 aa, Artificial Sequence
  Synthetic Polypeptide
ISGSGGRT

SEQ ID NO: 11918 - protein, 7 aa, Artificial Sequence
  Synthetic Polypeptide
INYGGST

SEQ ID NO: 11919 - protein, 10 aa, Artificial Sequence
  Synthetic Polypeptide
IRSKAYGGTT

SEQ ID NO: 11920 - protein, 8 aa, Artificial Sequence
  Synthetic Polypeptide
ISWNSGSI

SEQ ID NO: 11921 - protein, 8 aa, Artificial Sequence
  Synthetic Polypeptide
IIPILGIA

SEQ ID NO: 11922 - protein, 8 aa, Artificial Sequence
  Synthetic Polypeptide
INTETREP

SEQ ID NO: 11923 - protein, 8 aa, Artificial Sequence
  Synthetic Polypeptide
INTETGEP

SEQ ID NO: 11924 - protein, 8 aa, Artificial Sequence
  Synthetic Polypeptide
IIPSNGAT

SEQ ID NO: 11925 - protein, 8 aa, Artificial Sequence
  Synthetic Polypeptide
IIPSNGAT

SEQ ID NO: 11926 - protein, 8 aa, Artificial Sequence
  Synthetic Polypeptide
IDPYDSET

SEQ ID NO: 11927 - protein, 8 aa, Artificial Sequence
  Synthetic Polypeptide
ILYDGGRT

SEQ ID NO: 11928 - protein, 7 aa, Artificial Sequence
  Synthetic Polypeptide
MWSDGDT

SEQ ID NO: 11929 - protein, 8 aa, Artificial Sequence
  Synthetic Polypeptide
IDPEDGET

SEQ ID NO: 11930 - protein, 8 aa, Artificial Sequence
  Synthetic Polypeptide
IYPGDGDT

SEQ ID NO: 11931 - protein, 8 aa, Artificial Sequence
  Synthetic Polypeptide
IYPDDSDT

SEQ ID NO: 11932 - protein, 8 aa, Artificial Sequence
  Synthetic Polypeptide
INPYNDGT

SEQ ID NO: 11933 - protein, 8 aa, Artificial Sequence
  Synthetic Polypeptide
IYPGDGDT

SEQ ID NO: 11934 - protein, 8 aa, Artificial Sequence
  Synthetic Polypeptide
IYPGNGDT

SEQ ID NO: 11935 - protein, 8 aa, Artificial Sequence
  Synthetic Polypeptide
ISWNSGTI

SEQ ID NO: 11936 - protein, 8 aa, Artificial Sequence
  Synthetic Polypeptide
IYPGDGST

SEQ ID NO: 11937 - protein, 8 aa, Artificial Sequence
  Synthetic Polypeptide
IDPANGNT

SEQ ID NO: 11938 - protein, 8 aa, Artificial Sequence
  Synthetic Polypeptide
VNPYNGGT

SEQ ID NO: 11939 - protein, 8 aa, Artificial Sequence
  Synthetic Polypeptide
INPYNGAA

SEQ ID NO: 11940 - protein, 7 aa, Artificial Sequence
  Synthetic Polypeptide
ISYDGRN

SEQ ID NO: 11941 - protein, 8 aa, Artificial Sequence
  Synthetic Polypeptide
ISYDGRNN

SEQ ID NO: 11942 - protein, 10 aa, Artificial Sequence
  Synthetic Polypeptide
FRNKPYNYET

SEQ ID NO: 11943 - protein, 8 aa, Artificial Sequence
  Synthetic Polypeptide
LSARSSLT

SEQ ID NO: 11944 - protein, 8 aa, Artificial Sequence
  Synthetic Polypeptide
ISSTGRST

SEQ ID NO: 11945 - protein, 8 aa, Artificial Sequence
  Synthetic Polypeptide
ISGRGRST

SEQ ID NO: 11946 - protein, 8 aa, Artificial Sequence
  Synthetic Polypeptide
IRNDGSDK

SEQ ID NO: 11947 - protein, 8 aa, Artificial Sequence
  Synthetic Polypeptide
INPNIGDT

SEQ ID NO: 11948 - protein, 8 aa, Artificial Sequence
  Synthetic Polypeptide
IYPGDSDT

SEQ ID NO: 11949 - protein, 8 aa, Artificial Sequence
  Synthetic Polypeptide
LNPNNGDT

SEQ ID NO: 11950 - protein, 8 aa, Artificial Sequence
  Synthetic Polypeptide
INTETGEP

SEQ ID NO: 11951 - protein, 8 aa, Artificial Sequence
  Synthetic Polypeptide
INTESGVP

SEQ ID NO: 11952 - protein, 7 aa, Artificial Sequence
  Synthetic Polypeptide
ITYSGST

SEQ ID NO: 11953 - protein, 8 aa, Artificial Sequence
  Synthetic Polypeptide
ISWNSGSI

SEQ ID NO: 11954 - protein, 9 aa, Artificial Sequence
  Synthetic Polypeptide
TYHRSTWYD

SEQ ID NO: 11955 - protein, 8 aa, Artificial Sequence
  Synthetic Polypeptide
MNPNSGNT

SEQ ID NO: 11956 - protein, 9 aa, Artificial Sequence
  Synthetic Polypeptide
TYYRSKWYS

SEQ ID NO: 11957 - protein, 9 aa, Artificial Sequence
  Synthetic Polypeptide
TYHRSTWYD

SEQ ID NO: 11958 - protein, 8 aa, Artificial Sequence
  Synthetic Polypeptide
IRSKSNNF

SEQ ID NO: 11959 - protein, 7 aa, Artificial Sequence
  Synthetic Polypeptide
ITYSGST

SEQ ID NO: 11960 - protein, 8 aa, Artificial Sequence
  Synthetic Polypeptide
ISSNGRYI

SEQ ID NO: 11961 - protein, 8 aa, Artificial Sequence
  Synthetic Polypeptide
INNGSGYI

SEQ ID NO: 11962 - protein, 16 aa, Artificial Sequence
  Synthetic Polypeptide
YISSGGGTYYPDTVKG

SEQ ID NO: 11963 - protein, 16 aa, Artificial Sequence
  Synthetic Polypeptide
YISNSGSTSYNPSLKS

SEQ ID NO: 11964 - protein, 17 aa, Artificial Sequence
  Synthetic Polypeptide
WIDPENGDTEYGPKFQG

SEQ ID NO: 11965 - protein, 16 aa, Artificial Sequence
  Synthetic Polypeptide
VIWSGGSTDYNAAFIS

SEQ ID NO: 11966 - protein, 17 aa, Artificial Sequence
  Synthetic Polypeptide
ENDPSNGRTNYNEKFKN

SEQ ID NO: 11967 - protein, 17 aa, Artificial Sequence
  Synthetic Polypeptide
RIYPGDGETNYNGKFKD

SEQ ID NO: 11968 - protein, 17 aa, Artificial Sequence
  Synthetic Polypeptide
TIYPSSGKTYYADSAKG

SEQ ID NO: 11969 - protein, 17 aa, Artificial Sequence
  Synthetic Polypeptide
WINTETREPAYAYDFRG

SEQ ID NO: 11970 - protein, 16 aa, Artificial Sequence
  Synthetic Polypeptide
YIHHSGSTHYNPSLKS

SEQ ID NO: 11971 - protein, 16 aa, Artificial Sequence
  Synthetic Polypeptide
YIYYSGSTNYNPSLKS

SEQ ID NO: 11972 - protein, 16 aa, Artificial Sequence
  Synthetic Polypeptide
HIFSNAEKSYRTSLKS

SEQ ID NO: 11973 - protein, 17 aa, Artificial Sequence
  Synthetic Polypeptide
VIWYDGSNEYYGDPVKG

SEQ ID NO: 11974 - protein, 16 aa, Artificial Sequence
  Synthetic Polypeptide
SIYFTGSTDYNPSLKS

SEQ ID NO: 11975 - protein, 17 aa, Artificial Sequence
  Synthetic Polypeptide
WINTNTGNPTYAQGFTG

SEQ ID NO: 11976 - protein, 17 aa, Artificial Sequence
  Synthetic Polypeptide
RIYPGDGNTHYAQKFQG

SEQ ID NO: 11977 - protein, 17 aa, Artificial Sequence
  Synthetic Polypeptide
YIRPSTGYTEYNQKFKD

SEQ ID NO: 11978 - protein, 17 aa, Artificial Sequence
  Synthetic Polypeptide
TISNGGTYTYYPDSVKG

SEQ ID NO: 11979 - protein, 17 aa, Artificial Sequence
  Synthetic Polypeptide
QIYPGDYDTNYNGKFKG

SEQ ID NO: 11980 - protein, 17 aa, Artificial Sequence
  Synthetic Polypeptide
NIDPYYGTTYYNQMFTG

SEQ ID NO: 11981 - protein, 17 aa, Artificial Sequence
  Synthetic Polypeptide
AIDGSDTFNDYSQKFKG

SEQ ID NO: 11982 - protein, 17 aa, Artificial Sequence
  Synthetic Polypeptide
RIYPGDEDTNYSGKFKD

SEQ ID NO: 11983 - protein, 17 aa, Artificial Sequence
  Synthetic Polypeptide
QIYPGDGDTNYNGKFKG

SEQ ID NO: 11984 - protein, 17 aa, Artificial Sequence
  Synthetic Polypeptide
VISGSGGRPNYADSVKG

SEQ ID NO: 11985 - protein, 17 aa, Artificial Sequence
  Synthetic Polypeptide
WINTETREPAYAYDFRG

SEQ ID NO: 11986 - protein, 17 aa, Artificial Sequence
  Synthetic Polypeptide
WLSAYSGNTIYAQKLQG

SEQ ID NO: 11987 - protein, 17 aa, Artificial Sequence
  Synthetic Polypeptide
YISSDSRTIYYADSVKG

SEQ ID NO: 11988 - protein, 17 aa, Artificial Sequence
  Synthetic Polypeptide
GIWWDGSNEKYADSVKG

SEQ ID NO: 11989 - protein, 17 aa, Artificial Sequence
  Synthetic Polypeptide
RIYPTNGYTRYADSVKG

SEQ ID NO: 11990 - protein, 17 aa, Artificial Sequence
  Synthetic Polypeptide
YISSSGSTIYYADSVKG

SEQ ID NO: 11991 - protein, 17 aa, Artificial Sequence
  Synthetic Polypeptide
YISSSGGIIYYADSVKG

SEQ ID NO: 11992 - protein, 17 aa, Artificial Sequence
  Synthetic Polypeptide
VIWYDGSDKYYADSVRG

SEQ ID NO: 11993 - protein, 16 aa, Artificial Sequence
  Synthetic Polypeptide
AIGTAGATYYPGSVKG

SEQ ID NO: 11994 - protein, 16 aa, Artificial Sequence
  Synthetic Polypeptide
YIYYSGTTNYNPSLKS

SEQ ID NO: 11995 - protein, 17 aa, Artificial Sequence
  Synthetic Polypeptide
IINPSDGSTSYAQKFQG

SEQ ID NO: 11996 - protein, 17 aa, Artificial Sequence
  Synthetic Polypeptide
WIYPGNVNTNYNEKFKG

SEQ ID NO: 11997 - protein, 16 aa, Artificial Sequence
  Synthetic Polypeptide
YIYYSGSTFYNPSLKS

SEQ ID NO: 11998 - protein, 17 aa, Artificial Sequence
  Synthetic Polypeptide
IINPSGVSTTYAQKFQG

SEQ ID NO: 11999 - protein, 17 aa, Artificial Sequence
  Synthetic Polypeptide
AISGGGGRTYYADSVKG

SEQ ID NO: 12000 - protein, 17 aa, Artificial Sequence
  Synthetic Polypeptide
TVSSGGTYTYYPDSVKG

SEQ ID NO: 12001 - protein, 19 aa, Artificial Sequence
  Synthetic Polypeptide
EIRSKVNNHETYYAESVKG

SEQ ID NO: 12002 - protein, 17 aa, Artificial Sequence
  Synthetic Polypeptide
RIDPANGNSKYVPKFQG

SEQ ID NO: 12003 - protein, 17 aa, Artificial Sequence
  Synthetic Polypeptide
LIIPRYGKARYAQKFQG

SEQ ID NO: 12004 - protein, 19 aa, Artificial Sequence
  Synthetic Polypeptide
RIKSKTEGGTTDYAAPVKG

SEQ ID NO: 12005 - protein, 17 aa, Artificial Sequence
  Synthetic Polypeptide
IINPSGGSTSYAQKFQG

SEQ ID NO: 12006 - protein, 17 aa, Artificial Sequence
  Synthetic Polypeptide
LINPGSGGTNYNEKFKG

SEQ ID NO: 12007 - protein, 17 aa, Artificial Sequence
  Synthetic Polypeptide
EINPDSSTIQYTPSLKA

SEQ ID NO: 12008 - protein, 17 aa, Artificial Sequence
  Synthetic Polypeptide
AIYPGNGDTSYKQKFRG

SEQ ID NO: 12009 - protein, 8 aa, Artificial Sequence
  Synthetic Polypeptide
INPGNNYA

SEQ ID NO: 12010 - protein, 8 aa, Artificial Sequence
  Synthetic Polypeptide
ISSGGGTT

SEQ ID NO: 12011 - protein, 8 aa, Artificial Sequence
  Synthetic Polypeptide
INPDSSTI

SEQ ID NO: 12012 - protein, 7 aa, Artificial Sequence
  Synthetic Polypeptide
ISSGGGT

SEQ ID NO: 12013 - protein, 8 aa, Artificial Sequence
  Synthetic Polypeptide
IYPGDGDT

SEQ ID NO: 12014 - protein, 7 aa, Artificial Sequence
  Synthetic Polypeptide
IYYSGIT

SEQ ID NO: 12015 - protein, 7 aa, Artificial Sequence
  Synthetic Polypeptide
ITYSGST

SEQ ID NO: 12016 - protein, 7 aa, Artificial Sequence
  Synthetic Polypeptide
ISYSGST

SEQ ID NO: 12017 - protein, 7 aa, Artificial Sequence
  Synthetic Polypeptide
IWWDDDK

SEQ ID NO: 12018 - protein, 9 aa, Artificial Sequence
  Synthetic Polypeptide
IYYRSKWYN

SEQ ID NO: 12019 - protein, 12 aa, Artificial Sequence
  Synthetic Polypeptide
IYYSGITYYNPS

SEQ ID NO: 12020 - protein, 12 aa, Artificial Sequence
  Synthetic Polypeptide
IYYSGITYYNPS

SEQ ID NO: 12021 - protein, 12 aa, Artificial Sequence
  Synthetic Polypeptide
IYYSGITYYNPS

SEQ ID NO: 12022 - protein, 12 aa, Artificial Sequence
  Synthetic Polypeptide
IYYSGSTYYNPS

SEQ ID NO: 12023 - protein, 12 aa, Artificial Sequence
  Synthetic Polypeptide
IYYSGISYYNPS

SEQ ID NO: 12024 - protein, 12 aa, Artificial Sequence
  Synthetic Polypeptide
IYYSGITYYNPG

SEQ ID NO: 12025 - protein, 12 aa, Artificial Sequence
  Synthetic Polypeptide
IYYSGITYYNPT

SEQ ID NO: 12026 - protein, 12 aa, Artificial Sequence
  Synthetic Polypeptide
IYYSGITYYNPT

SEQ ID NO: 12027 - protein, 12 aa, Artificial Sequence
  Synthetic Polypeptide
IYYSGITYYNPT

SEQ ID NO: 12028 - protein, 12 aa, Artificial Sequence
  Synthetic Polypeptide
IYYSGITYYNPT

SEQ ID NO: 12029 - protein, 12 aa, Artificial Sequence
  Synthetic Polypeptide
IYYSGITYYNPT

SEQ ID NO: 12030 - protein, 12 aa, Artificial Sequence
  Synthetic Polypeptide
IYYSGITYYNPT

SEQ ID NO: 12031 - protein, 12 aa, Artificial Sequence
  Synthetic Polypeptide
IYYSGITYYNPT

SEQ ID NO: 12032 - protein, 12 aa, Artificial Sequence
  Synthetic Polypeptide
IYYSGITYYNPT

SEQ ID NO: 12033 - protein, 8 aa, Artificial Sequence
  Synthetic Polypeptide
IIPIEGRA

SEQ ID NO: 12034 - protein, 8 aa, Artificial Sequence
  Synthetic Polypeptide
IYPGDSDT

SEQ ID NO: 12035 - protein, 8 aa, Artificial Sequence
  Synthetic Polypeptide
ISAIFGTA

SEQ ID NO: 12036 - protein, 8 aa, Artificial Sequence
  Synthetic Polypeptide
IYPGNGDT

SEQ ID NO: 12037 - protein, 8 aa, Artificial Sequence
  Synthetic Polypeptide
INTSTGES

SEQ ID NO: 12038 - protein, 8 aa, Artificial Sequence
  Synthetic Polypeptide
IHPDSSTI

SEQ ID NO: 12039 - protein, 7 aa, Artificial Sequence
  Synthetic Polypeptide
IQYSGIT

SEQ ID NO: 12040 - protein, 8 aa, Artificial Sequence
  Synthetic Polypeptide
IYPTNGYT

SEQ ID NO: 12041 - protein, 8 aa, Artificial Sequence
  Synthetic Polypeptide
ISYDGSNK

SEQ ID NO: 12042 - protein, 10 aa, Artificial Sequence
  Synthetic Polypeptide
IKDTSNNYAT

SEQ ID NO: 12043 - protein, 8 aa, Artificial Sequence
  Synthetic Polypeptide
INPSSGCS

SEQ ID NO: 12044 - protein, 8 aa, Artificial Sequence
  Synthetic Polypeptide
ISWNSGSI

SEQ ID NO: 12045 - protein, 8 aa, Artificial Sequence
  Synthetic Polypeptide
IIPIFGTA

SEQ ID NO: 12046 - protein, 8 aa, Artificial Sequence
  Synthetic Polypeptide
ISWNSGSI

SEQ ID NO: 12047 - protein, 8 aa, Artificial Sequence
  Synthetic Polypeptide
ISWNSGSI

SEQ ID NO: 12048 - protein, 7 aa, Artificial Sequence
  Synthetic Polypeptide
IWSNGGT

SEQ ID NO: 12049 - protein, 7 aa, Artificial Sequence
  Synthetic Polypeptide
MWSDGDT

SEQ ID NO: 12050 - protein, 8 aa, Artificial Sequence
  Synthetic Polypeptide
LNWNGDIT

SEQ ID NO: 12051 - protein, 8 aa, Artificial Sequence
  Synthetic Polypeptide
IKQDGSEK

SEQ ID NO: 12052 - protein, 8 aa, Artificial Sequence
  Synthetic Polypeptide
INPNNGGT

SEQ ID NO: 12053 - protein, 8 aa, Artificial Sequence
  Synthetic Polypeptide
INPNNGGT

SEQ ID NO: 12054 - protein, 8 aa, Artificial Sequence
  Synthetic Polypeptide
INPNNGGT

SEQ ID NO: 12055 - protein, 8 aa, Artificial Sequence
  Synthetic Polypeptide
INPNNGGT

SEQ ID NO: 12056 - protein, 8 aa, Artificial Sequence
  Synthetic Polypeptide
INPNNGGT

SEQ ID NO: 12057 - protein, 8 aa, Artificial Sequence
  Synthetic Polypeptide
ISGGGTYI

SEQ ID NO: 12058 - protein, 8 aa, Artificial Sequence
  Synthetic Polypeptide
ISGGGTYI

SEQ ID NO: 12059 - protein, 8 aa, Artificial Sequence
  Synthetic Polypeptide
ISSGGTYI

SEQ ID NO: 12060 - protein, 8 aa, Artificial Sequence
  Synthetic Polypeptide
ISSGGSYT

SEQ ID NO: 12061 - protein, 8 aa, Artificial Sequence
  Synthetic Polypeptide
IRPSTGYT

SEQ ID NO: 12062 - protein, 8 aa, Artificial Sequence
  Synthetic Polypeptide
IRPSTGYT

SEQ ID NO: 12063 - protein, 8 aa, Artificial Sequence
  Synthetic Polypeptide
IRPSTGYT

SEQ ID NO: 12064 - protein, 8 aa, Artificial Sequence
  Synthetic Polypeptide
ISNGGTYT

SEQ ID NO: 12065 - protein, 8 aa, Artificial Sequence
  Synthetic Polypeptide
ISNGGTYT

SEQ ID NO: 12066 - protein, 8 aa, Artificial Sequence
  Synthetic Polypeptide
ISNGGTYT

SEQ ID NO: 12067 - protein, 13 aa, Artificial Sequence
  Synthetic Polypeptide
VRYYYGSSGYFDY

SEQ ID NO: 12068 - protein, 13 aa, Artificial Sequence
  Synthetic Polypeptide
ARRRYYGSSSFDY

SEQ ID NO: 12069 - protein, 10 aa, Artificial Sequence
  Synthetic Polypeptide
SNDYLYSLDF

SEQ ID NO: 12070 - protein, 14 aa, Artificial Sequence
  Synthetic Polypeptide
ARGAIYDGYDVLDN

SEQ ID NO: 12071 - protein, 13 aa, Artificial Sequence
  Synthetic Polypeptide
ARSHLLRASWFAY

SEQ ID NO: 12072 - protein, 15 aa, Artificial Sequence
  Synthetic Polypeptide
ARRDYYGNFYYAMDY

SEQ ID NO: 12073 - protein, 11 aa, Artificial Sequence
  Synthetic Polypeptide
ARDYGYGYFDY

SEQ ID NO: 12074 - protein, 12 aa, Artificial Sequence
  Synthetic Polypeptide
ARMELWSYYFDY

SEQ ID NO: 12075 - protein, 14 aa, Artificial Sequence
  Synthetic Polypeptide
AKHYYYGGSYAMDY

SEQ ID NO: 12076 - protein, 14 aa, Artificial Sequence
  Synthetic Polypeptide
AKHYYYGGSYAMDY

SEQ ID NO: 12077 - protein, 15 aa, Artificial Sequence
  Synthetic Polypeptide
AKDIQYGNYYYGMDV

SEQ ID NO: 12078 - protein, 12 aa, Artificial Sequence
  Synthetic Polypeptide
ARNVFDGYWLVY

SEQ ID NO: 12079 - protein, 13 aa, Artificial Sequence
  Synthetic Polypeptide
ARDGSSWDWYFDV

SEQ ID NO: 12080 - protein, 10 aa, Artificial Sequence
  Synthetic Polypeptide
ARWGGGAFDI

SEQ ID NO: 12081 - protein, 6 aa, Artificial Sequence
  Synthetic Polypeptide
ASLTAY

SEQ ID NO: 12082 - protein, 10 aa, Artificial Sequence
  Synthetic Polypeptide
ANYGNYWFAY

SEQ ID NO: 12083 - protein, 13 aa, Artificial Sequence
  Synthetic Polypeptide
VRGYFDWVDYFDY

SEQ ID NO: 12084 - protein, 13 aa, Artificial Sequence
  Synthetic Polypeptide
TREPLTGYYAMDY

SEQ ID NO: 12085 - protein, 9 aa, Artificial Sequence
  Synthetic Polypeptide
TRGNWDVVY

SEQ ID NO: 12086 - protein, 11 aa, Artificial Sequence
  Synthetic Polypeptide
AREVRLRYFDV

SEQ ID NO: 12087 - protein, 15 aa, Artificial Sequence
  Synthetic Polypeptide
ARWSWSDGYYVYFDY

SEQ ID NO: 12088 - protein, 15 aa, Artificial Sequence
  Synthetic Polypeptide
ARGYGNYARGAWLAY

SEQ ID NO: 12089 - protein, 14 aa, Artificial Sequence
  Synthetic Polypeptide
ARRMITTGDWYFDV

SEQ ID NO: 12090 - protein, 14 aa, Artificial Sequence
  Synthetic Polypeptide
ARRMITTGDWYFDV

SEQ ID NO: 12091 - protein, 11 aa, Artificial Sequence
  Synthetic Polypeptide
ARDYGDYGMDY

SEQ ID NO: 12092 - protein, 6 aa, Artificial Sequence
  Synthetic Polypeptide
ARNLYL

SEQ ID NO: 12093 - protein, 10 aa, Artificial Sequence
  Synthetic Polypeptide
TRRVPIRLDY

SEQ ID NO: 12094 - protein, 16 aa, Artificial Sequence
  Synthetic Polypeptide
ARWGYSYRNYAYYYDY

SEQ ID NO: 12095 - protein, 19 aa, Artificial Sequence
  Synthetic Polypeptide
ARDQRRIAAAGTHFYGMDV

SEQ ID NO: 12096 - protein, 9 aa, Artificial Sequence
  Synthetic Polypeptide
ARGGGYFDY

SEQ ID NO: 12097 - protein, 11 aa, Artificial Sequence
  Synthetic Polypeptide
ARQWGSYAFDS

SEQ ID NO: 12098 - protein, 11 aa, Artificial Sequence
  Synthetic Polypeptide
ARHDGYSYFDY

SEQ ID NO: 12099 - protein, 12 aa, Artificial Sequence
  Synthetic Polypeptide
ARSGQFGNYFDY

SEQ ID NO: 12100 - protein, 13 aa, Artificial Sequence
  Synthetic Polypeptide
TRDDGYYGYAMDY

SEQ ID NO: 12101 - protein, 13 aa, Artificial Sequence
  Synthetic Polypeptide
ARPIYFDNDYFDY

SEQ ID NO: 12102 - protein, 12 aa, Artificial Sequence
  Synthetic Polypeptide
ARPDGNYWYFDV

SEQ ID NO: 12103 - protein, 13 aa, Artificial Sequence
  Synthetic Polypeptide
ARSTMIATRAMDY

SEQ ID NO: 12104 - protein, 13 aa, Artificial Sequence
  Synthetic Polypeptide
AIVGSFSGIAYRP

SEQ ID NO: 12105 - protein, 13 aa, Artificial Sequence
  Synthetic Polypeptide
AIVGSFSPLTLGL

SEQ ID NO: 12106 - protein, 16 aa, Artificial Sequence
  Synthetic Polypeptide
ARIVSFDNDVVSAMDY

SEQ ID NO: 12107 - protein, 11 aa, Artificial Sequence
  Synthetic Polypeptide
ARIGDSSPSDY

SEQ ID NO: 12108 - protein, 13 aa, Artificial Sequence
  Synthetic Polypeptide
ARALTYYDYEFAY

SEQ ID NO: 12109 - protein, 7 aa, Artificial Sequence
  Synthetic Polypeptide
AFRGGVY

SEQ ID NO: 12110 - protein, 20 aa, Artificial Sequence
  Synthetic Polypeptide
AKDMGWGSGWRPYYYYGMDV

SEQ ID NO: 12111 - protein, 12 aa, Artificial Sequence
  Synthetic Polypeptide
ARLRNWDEPMDY

SEQ ID NO: 12112 - protein, 15 aa, Artificial Sequence
  Synthetic Polypeptide
ATFALFGFREQAFDI

SEQ ID NO: 12113 - protein, 15 aa, Artificial Sequence
  Synthetic Polypeptide
ARDRSYGDSSWALDA

SEQ ID NO: 12114 - protein, 11 aa, Artificial Sequence
  Synthetic Polypeptide
TRYDGSRAMDY

SEQ ID NO: 12115 - protein, 6 aa, Artificial Sequence
  Synthetic Polypeptide
VSGMEY

SEQ ID NO: 12116 - protein, 13 aa, Artificial Sequence
  Synthetic Polypeptide
ASRGGHYGYALDY

SEQ ID NO: 12117 - protein, 12 aa, Artificial Sequence
  Synthetic Polypeptide
TRVKLGTYYFDS

SEQ ID NO: 12118 - protein, 13 aa, Artificial Sequence
  Synthetic Polypeptide
VRYANIGYEYFNV

SEQ ID NO: 12119 - protein, 14 aa, Artificial Sequence
  Synthetic Polypeptide
AGTVTTYYYFGMDV

SEQ ID NO: 12120 - protein, 11 aa, Artificial Sequence
  Synthetic Polypeptide
ARYISRGLGDS

SEQ ID NO: 12121 - protein, 10 aa, Artificial Sequence
  Synthetic Polypeptide
ARGYGKAYDQ

SEQ ID NO: 12122 - protein, 13 aa, Artificial Sequence
  Synthetic Polypeptide
SRWGGDGFYAMDV

SEQ ID NO: 12123 - protein, 12 aa, Artificial Sequence
  Synthetic Polypeptide
ARFGGEVLRYTD

SEQ ID NO: 12124 - protein, 24 aa, Artificial Sequence
  Synthetic Polypeptide
ARDFGPDWEDGDSYDGSGRGFFDF

SEQ ID NO: 12125 - protein, 11 aa, Artificial Sequence
  Synthetic Polypeptide
AKGPGWGSFDL

SEQ ID NO: 12126 - protein, 10 aa, Artificial Sequence
  Synthetic Polypeptide
ARDHRDAMDY

SEQ ID NO: 12127 - protein, 15 aa, Artificial Sequence
  Synthetic Polypeptide
ARQGTTALATRFFDV

SEQ ID NO: 12128 - protein, 10 aa, Artificial Sequence
  Synthetic Polypeptide
ALGGGYAMDY

SEQ ID NO: 12129 - protein, 10 aa, Artificial Sequence
  Synthetic Polypeptide
RANWDVAFAY

SEQ ID NO: 12130 - protein, 12 aa, Artificial Sequence
  Synthetic Polypeptide
ARYRSYDWYFDV

SEQ ID NO: 12131 - protein, 12 aa, Artificial Sequence
  Synthetic Polypeptide
ASHYGSTLAFAS

SEQ ID NO: 12132 - protein, 16 aa, Artificial Sequence
  Synthetic Polypeptide
TRRIGNSDYDWWYFDV

SEQ ID NO: 12133 - protein, 11 aa, Artificial Sequence
  Synthetic Polypeptide
ARLGRRYALDY

SEQ ID NO: 12134 - protein, 11 aa, Artificial Sequence
  Synthetic Polypeptide
ARLGRRYTMDY

SEQ ID NO: 12135 - protein, 11 aa, Artificial Sequence
  Synthetic Polypeptide
ARLGRRYTMDY

SEQ ID NO: 12136 - protein, 11 aa, Artificial Sequence
  Synthetic Polypeptide
VRQGGDFPMDY

SEQ ID NO: 12137 - protein, 13 aa, Artificial Sequence
  Synthetic Polypeptide
ARAHNSSSWSFDY

SEQ ID NO: 12138 - protein, 17 aa, Artificial Sequence
  Synthetic Polypeptide
ARGAGYNFDGAYRFFDF

SEQ ID NO: 12139 - protein, 12 aa, Artificial Sequence
  Synthetic Polypeptide
ASPRGRGSAFDI

SEQ ID NO: 12140 - protein, 11 aa, Artificial Sequence
  Synthetic Polypeptide
ARTRSSGAFDI

SEQ ID NO: 12141 - protein, 11 aa, Artificial Sequence
  Synthetic Polypeptide
GRSGNDDAMDY

SEQ ID NO: 12142 - protein, 9 aa, Artificial Sequence
  Synthetic Polypeptide
KRSYGNYDY

SEQ ID NO: 12143 - protein, 9 aa, Artificial Sequence
  Synthetic Polypeptide
KTSTFFFDY

SEQ ID NO: 12144 - protein, 14 aa, Artificial Sequence
  Synthetic Polypeptide
GRGGYGSSYWYFDV

SEQ ID NO: 12145 - protein, 14 aa, Artificial Sequence
  Synthetic Polypeptide
ARVQYSGYYDWFDP

SEQ ID NO: 12146 - protein, 11 aa, Artificial Sequence
  Synthetic Polypeptide
VRHTALAGFDY

SEQ ID NO: 12147 - protein, 14 aa, Artificial Sequence
  Synthetic Polypeptide
ARERGYGYHDPHDY

SEQ ID NO: 12148 - protein, 11 aa, Artificial Sequence
  Synthetic Polypeptide
ARSGGYDPMDY

SEQ ID NO: 12149 - protein, 12 aa, Artificial Sequence
  Synthetic Polypeptide
ARERYFDWSFDY

SEQ ID NO: 12150 - protein, 11 aa, Artificial Sequence
  Synthetic Polypeptide
ARDISYGSFDY

SEQ ID NO: 12151 - protein, 9 aa, Artificial Sequence
  Synthetic Polypeptide
AREITTVDY

SEQ ID NO: 12152 - protein, 14 aa, Artificial Sequence
  Synthetic Polypeptide
ARLDGSSYRGAMDS

SEQ ID NO: 12153 - protein, 9 aa, Artificial Sequence
  Synthetic Polypeptide
ASLTTGSDS

SEQ ID NO: 12154 - protein, 13 aa, Artificial Sequence
  Synthetic Polypeptide
AKDRDFWSGPFDY

SEQ ID NO: 12155 - protein, 17 aa, Artificial Sequence
  Synthetic Polypeptide
ARYNEYKSYIYDWYFDF

SEQ ID NO: 12156 - protein, 15 aa, Artificial Sequence
  Synthetic Polypeptide
ARDGLYSSSWYDSDY

SEQ ID NO: 12157 - protein, 19 aa, Artificial Sequence
  Synthetic Polypeptide
AKDIHSGSYYGLLYYAMDV

SEQ ID NO: 12158 - protein, 14 aa, Artificial Sequence
  Synthetic Polypeptide
ARGGYYSHDMWSED

SEQ ID NO: 12159 - protein, 10 aa, Artificial Sequence
  Synthetic Polypeptide
ALDYSYAMDY

SEQ ID NO: 12160 - protein, 10 aa, Artificial Sequence
  Synthetic Polypeptide
SNDYLYSLDY

SEQ ID NO: 12161 - protein, 13 aa, Artificial Sequence
  Synthetic Polypeptide
ARSHLLRASWFAY

SEQ ID NO: 12162 - protein, 13 aa, Artificial Sequence
  Synthetic Polypeptide
ARSHLLRASWFAY

SEQ ID NO: 12163 - protein, 8 aa, Artificial Sequence
  Synthetic Polypeptide
ARGNWDDY

SEQ ID NO: 12164 - protein, 12 aa, Artificial Sequence
  Synthetic Polypeptide
ATHSRGTDYFDY

SEQ ID NO: 12165 - protein, 11 aa, Artificial Sequence
  Synthetic Polypeptide
ARGYYSSYLYL

SEQ ID NO: 12166 - protein, 18 aa, Artificial Sequence
  Synthetic Polypeptide
ARWGDVYYGLMRGHVMDA

SEQ ID NO: 12167 - protein, 14 aa, Artificial Sequence
  Synthetic Polypeptide
ARSGFITTVLDFDY

SEQ ID NO: 12168 - protein, 14 aa, Artificial Sequence
  Synthetic Polypeptide
ARHVTMIWGVIIDF

SEQ ID NO: 12169 - protein, 14 aa, Artificial Sequence
  Synthetic Polypeptide
ARGTYYYGTRVFDY

SEQ ID NO: 12170 - protein, 14 aa, Artificial Sequence
  Synthetic Polypeptide
ARSITTVVGCAMDY

SEQ ID NO: 12171 - protein, 11 aa, Artificial Sequence
  Synthetic Polypeptide
ARYDYNYAMDY

SEQ ID NO: 12172 - protein, 15 aa, Artificial Sequence
  Synthetic Polypeptide
AKDIQYGNYYYGMDV

SEQ ID NO: 12173 - protein, 10 aa, Artificial Sequence
  Synthetic Polypeptide
ASGYEDAMDY

SEQ ID NO: 12174 - protein, 7 aa, Artificial Sequence
  Synthetic Polypeptide
ARRGGVD

SEQ ID NO: 12175 - protein, 13 aa, Artificial Sequence
  Synthetic Polypeptide
ARDHYRYDPLLDY

SEQ ID NO: 12176 - protein, 15 aa, Artificial Sequence
  Synthetic Polypeptide
AIERGADLEGYAMDY

SEQ ID NO: 12177 - protein, 16 aa, Artificial Sequence
  Synthetic Polypeptide
AREGDYDVGNYYAMDY

SEQ ID NO: 12178 - protein, 16 aa, Artificial Sequence
  Synthetic Polypeptide
AKEGDYDVGNYYAMDY

SEQ ID NO: 12179 - protein, 10 aa, Artificial Sequence
  Synthetic Polypeptide
TGASYGMEYL

SEQ ID NO: 12180 - protein, 20 aa, Artificial Sequence
  Synthetic Polypeptide
ARRSYDSSGYWGHFYSYMDV

SEQ ID NO: 12181 - protein, 7 aa, Artificial Sequence
  Synthetic Polypeptide
ARVSFDY

SEQ ID NO: 12182 - protein, 11 aa, Artificial Sequence
  Synthetic Polypeptide
ARYYHAGAFDL

SEQ ID NO: 12183 - protein, 16 aa, Artificial Sequence
  Synthetic Polypeptide
AKNGESGPLDYWYLDL

SEQ ID NO: 12184 - protein, 7 aa, Artificial Sequence
  Synthetic Polypeptide
SVGYFDV

SEQ ID NO: 12185 - protein, 23 aa, Artificial Sequence
  Synthetic Polypeptide
ARQVWGWQGGMYPRSNWWYNLDS

SEQ ID NO: 12186 - protein, 13 aa, Artificial Sequence
  Synthetic Polypeptide
ARTGRYEENAMDY

SEQ ID NO: 12187 - protein, 10 aa, Artificial Sequence
  Synthetic Polypeptide
SNDYLYSLDY

SEQ ID NO: 12188 - protein, 10 aa, Artificial Sequence
  Synthetic Polypeptide
SNDYLYSLDF

SEQ ID NO: 12189 - protein, 11 aa, Artificial Sequence
  Synthetic Polypeptide
ARLGRRYTMDY

SEQ ID NO: 12190 - protein, 17 aa, Artificial Sequence
  Synthetic Polypeptide
AKDKGGGYYDFWSGSDY

SEQ ID NO: 12191 - protein, 17 aa, Artificial Sequence
  Synthetic Polypeptide
ARDRLQDGNSWSDAFDV

SEQ ID NO: 12192 - protein, 15 aa, Artificial Sequence
  Synthetic Polypeptide
ARGDSNYWSYYGMDV

SEQ ID NO: 12193 - protein, 17 aa, Artificial Sequence
  Synthetic Polypeptide
ARDPYDFWSGYPDAFDI

SEQ ID NO: 12194 - protein, 17 aa, Artificial Sequence
  Synthetic Polypeptide
ARVRLQDGNSWSDAFDV

SEQ ID NO: 12195 - protein, 11 aa, Artificial Sequence
  Synthetic Polypeptide
ARQGGDFPMDY

SEQ ID NO: 12196 - protein, 11 aa, Artificial Sequence
  Synthetic Polypeptide
ARLGRRYALDY

SEQ ID NO: 12197 - protein, 15 aa, Artificial Sequence
  Synthetic Polypeptide
ARVVDFDQDYNGFDY

SEQ ID NO: 12198 - protein, 13 aa, Artificial Sequence
  Synthetic Polypeptide
ARGQWWSGGDFDY

SEQ ID NO: 12199 - protein, 16 aa, Artificial Sequence
  Synthetic Polypeptide
ARHSGYGTHWGVLFAY

SEQ ID NO: 12200 - protein, 17 aa, Artificial Sequence
  Synthetic Polypeptide
AKERNYDYDDYYYAMDY

SEQ ID NO: 12201 - protein, 13 aa, Artificial Sequence
  Synthetic Polypeptide
AVHNAHYGTWFAY

SEQ ID NO: 12202 - protein, 10 aa, Artificial Sequence
  Synthetic Polypeptide
ARELIHAMDN

SEQ ID NO: 12203 - protein, 12 aa, Artificial Sequence
  Synthetic Polypeptide
ARGPNYFYSMDY

SEQ ID NO: 12204 - protein, 12 aa, Artificial Sequence
  Synthetic Polypeptide
ARIYGNNVYFDV

SEQ ID NO: 12205 - protein, 14 aa, Artificial Sequence
  Synthetic Polypeptide
TRDSYADDAALFDI

SEQ ID NO: 12206 - protein, 10 aa, Artificial Sequence
  Synthetic Polypeptide
ALDYSYAMDY

SEQ ID NO: 12207 - protein, 16 aa, Artificial Sequence
  Synthetic Polypeptide
ASLVYCGGDCYSGFDY

SEQ ID NO: 12208 - protein, 16 aa, Artificial Sequence
  Synthetic Polypeptide
VSLVYCGGDCYSGFDY

SEQ ID NO: 12209 - protein, 19 aa, Artificial Sequence
  Synthetic Polypeptide
ARIPGYGGNGDYHYYGMDV

SEQ ID NO: 12210 - protein, 13 aa, Artificial Sequence
  Synthetic Polypeptide
ARSGIAVAGAFDY

SEQ ID NO: 12211 - protein, 14 aa, Artificial Sequence
  Synthetic Polypeptide
AKEDDSSGYYSFDY

SEQ ID NO: 12212 - protein, 14 aa, Artificial Sequence
  Synthetic Polypeptide
ARRYFDWLLGAFDI

SEQ ID NO: 12213 - protein, 10 aa, Artificial Sequence
  Synthetic Polypeptide
GEGYLDPMDY

SEQ ID NO: 12214 - protein, 9 aa, Artificial Sequence
  Synthetic Polypeptide
ARSRWLLDY

SEQ ID NO: 12215 - protein, 10 aa, Artificial Sequence
  Synthetic Polypeptide
ARFDGYIFDY

SEQ ID NO: 12216 - protein, 16 aa, Artificial Sequence
  Synthetic Polypeptide
ARGGSIYYGNLGFFDV

SEQ ID NO: 12217 - protein, 9 aa, Artificial Sequence
  Synthetic Polypeptide
ARGSAWFPY

SEQ ID NO: 12218 - protein, 8 aa, Artificial Sequence
  Synthetic Polypeptide
ARGGLLQY

SEQ ID NO: 12219 - protein, 8 aa, Artificial Sequence
  Synthetic Polypeptide
FCARSLLY

SEQ ID NO: 12220 - protein, 8 aa, Artificial Sequence
  Synthetic Polypeptide
FCARSITT

SEQ ID NO: 12221 - protein, 8 aa, Artificial Sequence
  Synthetic Polypeptide
YCAKVDYS

SEQ ID NO: 12222 - protein, 8 aa, Artificial Sequence
  Synthetic Polypeptide
FCALDYSY

SEQ ID NO: 12223 - protein, 8 aa, Artificial Sequence
  Synthetic Polypeptide
YCARDRIV

SEQ ID NO: 12224 - protein, 8 aa, Artificial Sequence
  Synthetic Polypeptide
YCARGGHG

SEQ ID NO: 12225 - protein, 8 aa, Artificial Sequence
  Synthetic Polypeptide
YCAKEAPY

SEQ ID NO: 12226 - protein, 8 aa, Artificial Sequence
  Synthetic Polypeptide
YCSRWGGW

SEQ ID NO: 12227 - protein, 8 aa, Artificial Sequence
  Synthetic Polypeptide
YCARDRNS

SEQ ID NO: 12228 - protein, 8 aa, Artificial Sequence
  Synthetic Polypeptide
YCARDVGS

SEQ ID NO: 12229 - protein, 8 aa, Artificial Sequence
  Synthetic Polypeptide
YCARDGYD

SEQ ID NO: 12230 - protein, 8 aa, Artificial Sequence
  Synthetic Polypeptide
CARGDYVW

SEQ ID NO: 12231 - protein, 8 aa, Artificial Sequence
  Synthetic Polypeptide
CARIAVAG

SEQ ID NO: 12232 - protein, 8 aa, Artificial Sequence
  Synthetic Polypeptide
YCARGGNS

SEQ ID NO: 12233 - protein, 8 aa, Artificial Sequence
  Synthetic Polypeptide
FCARGVYY

SEQ ID NO: 12234 - protein, 8 aa, Artificial Sequence
  Synthetic Polypeptide
YYCAREDT

SEQ ID NO: 12235 - protein, 8 aa, Artificial Sequence
  Synthetic Polypeptide
YCAEVRGS

SEQ ID NO: 12236 - protein, 8 aa, Artificial Sequence
  Synthetic Polypeptide
YYCAREEM

SEQ ID NO: 12237 - protein, 8 aa, Artificial Sequence
  Synthetic Polypeptide
YCARHRGN

SEQ ID NO: 12238 - protein, 8 aa, Artificial Sequence
  Synthetic Polypeptide
VYYCARND

SEQ ID NO: 12239 - protein, 8 aa, Artificial Sequence
  Synthetic Polypeptide
YCAPFGYY

SEQ ID NO: 12240 - protein, 8 aa, Artificial Sequence
  Synthetic Polypeptide
YCARNWPY

SEQ ID NO: 12241 - protein, 8 aa, Artificial Sequence
  Synthetic Polypeptide
VYYCTTPY

SEQ ID NO: 12242 - protein, 8 aa, Artificial Sequence
  Synthetic Polypeptide
YCARSFFT

SEQ ID NO: 12243 - protein, 8 aa, Artificial Sequence
  Synthetic Polypeptide
YCARRSPL

SEQ ID NO: 12244 - protein, 8 aa, Artificial Sequence
  Synthetic Polypeptide
YCARPAYW

SEQ ID NO: 12245 - protein, 8 aa, Artificial Sequence
  Synthetic Polypeptide
YCARGETA

SEQ ID NO: 12246 - protein, 10 aa, Artificial Sequence
  Synthetic Polypeptide
TREGYGNYGA

SEQ ID NO: 12247 - protein, 10 aa, Artificial Sequence
  Synthetic Polypeptide
ARHSGYGSSY

SEQ ID NO: 12248 - protein, 10 aa, Artificial Sequence
  Synthetic Polypeptide
ASLYYDYGDA

SEQ ID NO: 12249 - protein, 9 aa, Artificial Sequence
  Synthetic Polypeptide
ARHSGYGTH

SEQ ID NO: 12250 - protein, 11 aa, Artificial Sequence
  Synthetic Polypeptide
ARSITTVVGCA

SEQ ID NO: 12251 - protein, 10 aa, Artificial Sequence
  Synthetic Polypeptide
ARHDGAVAGL

SEQ ID NO: 12252 - protein, 11 aa, Artificial Sequence
  Synthetic Polypeptide
ARLGRRYTMDY

SEQ ID NO: 12253 - protein, 12 aa, Artificial Sequence
  Synthetic Polypeptide
ARPNYPFYAMDY

SEQ ID NO: 12254 - protein, 10 aa, Artificial Sequence
  Synthetic Polypeptide
ARSFGYGLDY

SEQ ID NO: 12255 - protein, 4 aa, Artificial Sequence
  Synthetic Polypeptide
ARYD

SEQ ID NO: 12256 - protein, 13 aa, Artificial Sequence
  Synthetic Polypeptide
ARHDGAVAGLFDY

SEQ ID NO: 12257 - protein, 13 aa, Artificial Sequence
  Synthetic Polypeptide
ARHDGAVAGLFDY

SEQ ID NO: 12258 - protein, 13 aa, Artificial Sequence
  Synthetic Polypeptide
ARHDGAMAGLFDY

SEQ ID NO: 12259 - protein, 13 aa, Artificial Sequence
  Synthetic Polypeptide
ARHDGAVAGLFDY

SEQ ID NO: 12260 - protein, 13 aa, Artificial Sequence
  Synthetic Polypeptide
ARHDGAVAGLFDY

SEQ ID NO: 12261 - protein, 13 aa, Artificial Sequence
  Synthetic Polypeptide
ARHDGAVAGLFDY

SEQ ID NO: 12262 - protein, 13 aa, Artificial Sequence
  Synthetic Polypeptide
ARHDGAVAGLFDY

SEQ ID NO: 12263 - protein, 13 aa, Artificial Sequence
  Synthetic Polypeptide
ARHDGAVAGLFDY

SEQ ID NO: 12264 - protein, 13 aa, Artificial Sequence
  Synthetic Polypeptide
ARHDGAVAGLFDY

SEQ ID NO: 12265 - protein, 13 aa, Artificial Sequence
  Synthetic Polypeptide
ARHDGAVAGLFDY

SEQ ID NO: 12266 - protein, 13 aa, Artificial Sequence
  Synthetic Polypeptide
ARHDGAVAGLFDY

SEQ ID NO: 12267 - protein, 13 aa, Artificial Sequence
  Synthetic Polypeptide
ARHDGAVAGLFDY

SEQ ID NO: 12268 - protein, 13 aa, Artificial Sequence
  Synthetic Polypeptide
ARHDGAVAGLFDY

SEQ ID NO: 12269 - protein, 13 aa, Artificial Sequence
  Synthetic Polypeptide
ARHDGAVAGLFDY

SEQ ID NO: 12270 - protein, 13 aa, Artificial Sequence
  Synthetic Polypeptide
ARGRYSYRYWFDY

SEQ ID NO: 12271 - protein, 15 aa, Artificial Sequence
  Synthetic Polypeptide
ARDVGRWAPGGFLDY

SEQ ID NO: 12272 - protein, 11 aa, Artificial Sequence
  Synthetic Polypeptide
ARGVASWYLDY

SEQ ID NO: 12273 - protein, 14 aa, Artificial Sequence
  Synthetic Polypeptide
ARSTYYGGDWYFNV

SEQ ID NO: 12274 - protein, 12 aa, Artificial Sequence
  Synthetic Polypeptide
ARWEVYHGYVPY

SEQ ID NO: 12275 - protein, 12 aa, Artificial Sequence
  Synthetic Polypeptide
ASLYFGFPWFAY

SEQ ID NO: 12276 - protein, 13 aa, Artificial Sequence
  Synthetic Polypeptide
AREDYDYHWYFDV

SEQ ID NO: 12277 - protein, 13 aa, Artificial Sequence
  Synthetic Polypeptide
SRWGGAGAYAMDV

SEQ ID NO: 12278 - protein, 14 aa, Artificial Sequence
  Synthetic Polypeptide
AKEAPYYAKDYMDV

SEQ ID NO: 12279 - protein, 13 aa, Artificial Sequence
  Synthetic Polypeptide
TTDFYDGTYYWNY

SEQ ID NO: 12280 - protein, 16 aa, Artificial Sequence
  Synthetic Polypeptide
ARRADYGNYEYTWFAY

SEQ ID NO: 12281 - protein, 11 aa, Artificial Sequence
  Synthetic Polypeptide
AKRGNSNSFDY

SEQ ID NO: 12282 - protein, 15 aa, Artificial Sequence
  Synthetic Polypeptide
ARDELWATNYYYMDV

SEQ ID NO: 12283 - protein, 11 aa, Artificial Sequence
  Synthetic Polypeptide
AKRGNSNSFDY

SEQ ID NO: 12284 - protein, 11 aa, Artificial Sequence
  Synthetic Polypeptide
AKRGNSNSFDY

SEQ ID NO: 12285 - protein, 13 aa, Artificial Sequence
  Synthetic Polypeptide
ARPRYNSGYFFDY

SEQ ID NO: 12286 - protein, 18 aa, Artificial Sequence
  Synthetic Polypeptide
ARLQVFGYPGIRDYVMDA

SEQ ID NO: 12287 - protein, 5 aa, Artificial Sequence
  Synthetic Polypeptide
ARVRT

SEQ ID NO: 12288 - protein, 13 aa, Artificial Sequence
  Synthetic Polypeptide
ARAWGYSSYYFDY

SEQ ID NO: 12289 - protein, 9 aa, Artificial Sequence
  Synthetic Polypeptide
AAGWNFDYW

SEQ ID NO: 12290 - protein, 8 aa, Artificial Sequence
  Synthetic Polypeptide
ARGWNFDY

SEQ ID NO: 12291 - protein, 8 aa, Artificial Sequence
  Synthetic Polypeptide
ARGWNFDY

SEQ ID NO: 12292 - protein, 8 aa, Artificial Sequence
  Synthetic Polypeptide
AAGWNFDY

SEQ ID NO: 12293 - protein, 8 aa, Artificial Sequence
  Synthetic Polypeptide
ARGWNFDY

SEQ ID NO: 12294 - protein, 15 aa, Artificial Sequence
  Synthetic Polypeptide
ARDNYGRNYDYGMDY

SEQ ID NO: 12295 - protein, 15 aa, Artificial Sequence
  Synthetic Polypeptide
TRDNYGRNYDYGMDY

SEQ ID NO: 12296 - protein, 14 aa, Artificial Sequence
  Synthetic Polypeptide
ARLGGDNYYEYFDV

SEQ ID NO: 12297 - protein, 10 aa, Artificial Sequence
  Synthetic Polypeptide
APTTVVPFAY

SEQ ID NO: 12298 - protein, 7 aa, Artificial Sequence
  Synthetic Polypeptide
SRWLLDY

SEQ ID NO: 12299 - protein, 7 aa, Artificial Sequence
  Synthetic Polypeptide
SRWLLDY

SEQ ID NO: 12300 - protein, 7 aa, Artificial Sequence
  Synthetic Polypeptide
SRWLLDY

SEQ ID NO: 12301 - protein, 8 aa, Artificial Sequence
  Synthetic Polypeptide
FDGYIFDY

SEQ ID NO: 12302 - protein, 8 aa, Artificial Sequence
  Synthetic Polypeptide
FDGYIFDY

SEQ ID NO: 12303 - protein, 8 aa, Artificial Sequence
  Synthetic Polypeptide
FDGYIFDY

SEQ ID NO: 12304 - protein, 1205 aa, Artificial Sequence
  Synthetic Polypeptide
MALPVTALLLPLALLLHAARPLPVLTQPPSVSVAPGKTARITCGGNNIGSKSVHWYQQKPGQAPVLVVYDDSDRPSGIPERFSGSNSGNTATLTISRVEAGDEADYYCQVWDSSSDYVVFGGGTKLTVLGQPKANPTVTLFPPSSEELQANKATLVCLISDFYPGAVTVAWKADGSPVKAGVETTKPSKQSNNKYAASSYLSLTPEQWKSHRSYSCQVTHEGSTVEKTVAPTECSGSQSFGLLDPKLSYLLDGILFIYGVILTALFLWRRKRKEKQSETSPKEFLTIYEDVKDLKTRRNHEQEQTFPGGGSTIYSMIQSQSSAPTSQEPAYTLYSLIQPSRKSGSRKRNHSPSFNSTIYEVIGKSQPKAQNPARLSRKELENFDVYSTSRVKFSRSADAPAYQQGQNQLYNELNLGRREEYDVLDKRRGRDPEMGGKPQRRKNPQEGLYNELQKDKMAEAYSEIGMKGERRRGKGHDGLYQGLSTATKDTYDALHMQALPPRRAKRSGSGATNFSLLKQAGDVEENPGPMDWIWRILFLVGAATGAHSFEVQLVQSGAEVKKPGESLKISCKGSGYSFTSYWIGWVRQMPGKGLEWMGIIYPGDSDTRYSPSFQGQVTISADKSISTAYLQWSSLKASDTAMYYCARQVWGWQGGMYPRSNWWYNLDSWGQGTLVTVSSASTKGPSVFPLAPSSKSTSGGTAALGCLVKDYFPEPVTVSWNSGALTSGVHTFPAVLQSSGLYSLSSVVTVPSSSLGTQTYICNVNHKPSNTKVDKRVEPKSCGTTTPGERSSLPAFYPGTSGSCSGCGSLSLPLLAGLVAADAVASLLIVGAVFLCARPRRSPAQEDGKVYINMPGRGSSRRVKFSRSADAPAYQQGQNQLYNELNLGRREEYDVLDKRRGRDPEMGGKPQRRKNPQEGLYNELQKDKMAEAYSEIGMKGERRRGKGHDGLYQGLSTATKDTYDALHMQALPPRRAKRSGSGVKQTLNFDLLKLAGDVESNPGPGHMTEYKPTVRLATRDDVPRAVRTLAAAFADYPATRHTVDPDRHIERVTELQELFLTRVGLDIGKVWVADDGAAVAVWTTPESVEAGAVFAEIGPRMAELSGSRLAAQQQMEGLLAPHRPKEPAWFLATVGVSPDHQGKGLGSAVVLPGVEAAERAGVPAFLETSAPRNLPFYERLGFTVTADVEVPEGPRTWCMTRKPGA

SEQ ID NO: 12305 - protein, 1132 aa, Artificial Sequence
  Synthetic Polypeptide
MALPVTALLLPLALLLHAARPACLWVSQPPEIRTLEGSSAFLPCSFNASQGRLAIGSVTWFRDEVVPGKEVRNGTPEFRGRLAPLASSRFLHDHQAELHIRDVRGHDASIYVCRVEVLGLGVGTGNGTRLVVEKEHPQLGGTGGGGSGGGGSGGGGSEFDIQMTQSPSSLSASVGDRVTITCKASDHINNWLAWYQQKPGQAPKLLIYGATTLETGVPSRFSGSGSGTDYTLTISSLQPEDFATYYCQQSWNTPWTFGQGTKLEIKRLEDLKNVFPPEVAVFEPSEAEISHTQKATLVCLATGFYPDHVELSWWVNGKEVHSGVCTDPQPLKEQPALNDSRYCLSSRLRVSATFWQNPRNHFRCQVQFYGLSENDEWTQDRAKPVTQIVSAEAWGRADCGFTSESYQQGVLSATILYEILLGKATLYAVLVSALVLMAMVKRKDSRGRAKRSGSGATNFSLLKQAGDVEENPGPTSATMDWIWRILFLVGAATGAHSGPEVQLVESGGGLVQAGGSLRLSCAASGRTFSMGWFRQAPGKEREFVAAITYSGGSPYYADSVKGRFTISRDNAKNTVYLQMNSLKPEDTAVYYCAANPTYGSDWNAENWGQGTQVTVSSGSGGGGSGGGGSGGGGSFEQVQLQQPGAELVKPGASVKMSCKASGYAFSSYWINWMKQKPGQGLEWIGQIYPGDGDTNYNGKFKGRATLTADTSSSTAYMQLSSLTSEDSAVYFCARSITTVVGCAMDYWGQGTSVTVSSTRIQNPDPAVYQLRDSKSSDKSVCLFTDFDSQTNVSQSKDSDVYITDKCVLDMRSMDFKSNSAVAWSNKSDFACANAFNNSIIPEDTFFPSPESSCDVKLVEKSFETDTNLNFQNLSVIGFRILLLKVAGFNLLMTLRLWSSRAKRSGSGVKQTLNFDLLKLAGDVESNPGPSRGHMTEYKPTVRLATRDDVPRAVRTLAAAFADYPATRHTVDPDRHIERVTELQELFLTRVGLDIGKVWVADDGAAVAVWTTPESVEAGAVFAEIGPRMAELSGSRLAAQQQMEGLLAPHRPKEPAWFLATVGVSPDHQGKGLGSAVVLPGVEAAERAGVPAFLETSAPRNLPFYERLGFTVTADVEVPEGPRTWCMTRKPGA

SEQ ID NO: 12306 - protein, 987 aa, Artificial Sequence
  Synthetic Polypeptide
MALPVTALLLPLALLLHAARPACQSKAQVLQSVAGQTLTVRCQYPPTGSLYEKKGWCKEASALVCIRLVTSSKPRTMAWTSRFTIWDDPDAGFFTVTMTDLREEDSGHYWCRIYRPSDNSVSLEDLKNVFPPEVAVFEPSEAEISHTQKATLVCLATGFYPDHVELSWWVNGKEVHSGVCTDPQPLKEQPALNDSRYCLSSRLRVSATFWQNPRNHFRCQVQFYGLSENDEWTQDRAKPVTQIVSAEAWGRADCGFTSESYQQGVLSATILYEILLGKATLYAVLVSALVLMAMVKRKDSRGRAKRSGSGATNFSLLKQAGDVEENPGPTSATMDWIWRILFLVGAATGAHSGPEVQLVESGGGLVQAGGSLRLSCAASGRTFSMGWFRQAPGKEREFVAAITYSGGSPYYADSVKGRFTISRDNAKNTVYLQMNSLKPEDTAVYYCAANPTYGSDWNAENWGQGTQVTVSSGSGGGGSGGGGSGGGGSFEQVQLQQPGAELVKPGASVKMSCKASGYAFSSYWINWMKQKPGQGLEWIGQIYPGDGDTNYNGKFKGRATLTADTSSSTAYMQLSSLTSEDSAVYFCARSITTVVGCAMDYWGQGTSVTVSSTRIQNPDPAVYQLRDSKSSDKSVCLFTDFDSQTNVSQSKDSDVYITDKCVLDMRSMDFKSNSAVAWSNKSDFACANAFNNSIIPEDTFFPSPESSCDVKLVEKSFETDTNLNFQNLSVIGFRILLLKVAGFNLLMTLRLWSSRAKRSGSGVKQTLNFDLLKLAGDVESNPGPSRGHMTEYKPTVRLATRDDVPRAVRTLAAAFADYPATRHTVDPDRHIERVTELQELFLTRVGLDIGKVWVADDGAAVAVWTTPESVEAGAVFAEIGPRMAELSGSRLAAQQQMEGLLAPHRPKEPAWFLATVGVSPDHQGKGLGSAVVLPGVEAAERAGVPAFLETSAPRNLPFYERLGFTVTADVEVPEGPRTWCMTRKPGA

SEQ ID NO: 12307 - protein, 1114 aa, Artificial Sequence
  Synthetic Polypeptide
MALPVTALLLPLALLLHAARPACQSKAQVLQSVAGQTLTVRCQYPPTGSLYEKKGWCKEASALVCIRLVTSSKPRTMAWTSRFTIWDDPDAGFFTVTMTDLREEDSGHYWCRIYRPSDNSVSGTGGGGSGGGGSGGGGSEFDIQMTQSPSSLSASVGDRVTITCKASDHINNWLAWYQQKPGQAPKLLIYGATTLETGVPSRFSGSGSGTDYTLTISSLQPEDFATYYCQQSWNTPWTFGQGTKLEIKRLEDLKNVFPPEVAVFEPSEAEISHTQKATLVCLATGFYPDHVELSWWVNGKEVHSGVCTDPQPLKEQPALNDSRYCLSSRLRVSATFWQNPRNHFRCQVQFYGLSENDEWTQDRAKPVTQIVSAEAWGRADCGFTSESYQQGVLSATILYEILLGKATLYAVLVSALVLMAMVKRKDSRGRAKRSGSGATNFSLLKQAGDVEENPGPTSATMDWIWRILFLVGAATGAHSGPEVQLVESGGGLVQAGGSLRLSCAASGRTFSMGWFRQAPGKEREFVAAITYSGGSPYYADSVKGRFTISRDNAKNTVYLQMNSLKPEDTAVYYCAANPTYGSDWNAENWGQGTQVTVSSGSGGGGSGGGGSGGGGSFEQVQLQQPGAELVKPGASVKMSCKASGYAFSSYWINWMKQKPGQGLEWIGQIYPGDGDTNYNGKFKGRATLTADTSSSTAYMQLSSLTSEDSAVYFCARSITTVVGCAMDYWGQGTSVTVSSTRIQNPDPAVYQLRDSKSSDKSVCLFTDFDSQTNVSQSKDSDVYITDKCVLDMRSMDFKSNSAVAWSNKSDFACANAFNNSIIPEDTFFPSPESSCDVKLVEKSFETDTNLNFQNLSVIGFRILLLKVAGFNLLMTLRLWSSRAKRSGSGVKQTLNFDLLKLAGDVESNPGPSRGHMTEYKPTVRLATRDDVPRAVRTLAAAFADYPATRHTVDPDRHIERVTELQELFLTRVGLDIGKVWVADDGAAVAVWTTPESVEAGAVFAEIGPRMAELSGSRLAAQQQMEGLLAPHRPKEPAWFLATVGVSPDHQGKGLGSAVVLPGVEAAERAGVPAFLETSAPRNLPFYERLGFTVTADVEVPEGPRTWCMTRKPGA

SEQ ID NO: 12308 - protein, 1131 aa, Artificial Sequence; identical to SEQ ID NO: 8346
  Synthetic Polypeptide

SEQ ID NO: 12309 - protein, 1131 aa, Artificial Sequence; identical to SEQ ID NO: 8346
  Synthetic Polypeptide

SEQ ID NO: 12310 - protein, 957 aa, Artificial Sequence; identical to SEQ ID NO: 3995
  Synthetic Polypeptide

SEQ ID NO: 12311 - protein, 849 aa, Artificial Sequence; identical to SEQ ID NO: 4150
  Synthetic Polypeptide
